(19) United States
(12) Patent Application Publication
(10) Pub. No.: US 2024/0317837 A1
(43) Pub. Date: Sep. 26, 2024

(54) FUSION PROTEINS COMPRISING A PROTEIN WITH PHASE BEHAVIOR

(71) Applicant: ISOLERE BIO, INC., Durham, NC (US)

(72) Inventors: Kelli M. LUGINBUHL, Durham, NC (US); Michael DZURICKY, Durham, NC (US)

(21) Appl. No.: 18/546,061

(22) PCT Filed: Feb. 18, 2022
(86) PCT No.: PCT/US2022/070727

§ 371 Date: Aug. 10, 2023

Related U.S. Application Data
(60) Provisional application No. 63/151,524, filed on Feb. 19, 2021.

(51) Int. Cl. C07K 14/78; C07K 14/005; C07K 14/31; C12N 9/12; C12P 21/02

(52) U.S. Cl. CPC C07K 14/78; C07K 14/005; C07K 14/31; C12N 9/1247; C12P 21/02; C07K 2319/35; C07K 2319/50; C12N 2750/14122; C12N 2770/20022

(57) ABSTRACT

Provided herein are fusion proteins comprising a first polypeptide and a second polypeptide, wherein the second polypeptide has phase behavior. The first polypeptide may be a polypeptide having a desirable biological activity, such as a polypeptide with therapeutic, cosmetic, and/or industrial importance. Fusing the first polypeptide to the polypeptide with phase behavior facilitates purification thereof, and may also help to stabilize the first polypeptide during expression, storage, or after exposure to various conditions known to unfold, degrade, or misfold proteins.

### CROSS-REFERENCE TO RELATED APPLICATIONS

[0001] This application claims priority to U.S. Provisional Application No. 63/151,524, filed Feb. 19, 2021, which is incorporated by reference herein in its entirety for all purposes.

### DESCRIPTION OF THE TEXT FILE SUBMITTED ELECTRONICALLY

[0002] The contents of the text file submitted electronically herewith are incorporated herein by reference in their entirety: A computer readable format copy of the Sequence Listing (filename: ISOL_006_00US_SeqList_ST25.txt, date recorded: Feb. 19, 2021; file size: 1 megabyte).

### FIELD

[0003] The present disclosure is generally related to compositions and methods for purification of biologics. More specifically, the disclosure is related to purification matrices comprising adeno-associated virus-binding polypeptides and methods of using the same.

### BACKGROUND OF THE INVENTION

[0004] The use of biologics in medicine and other disciplines is rapidly increasing. Biologics often have high affinity and specificity for a given target, as well as low toxicity and biodegradability. However, their manufacturing and purification can be quite difficult. Biologics, including therapeutic enzymes, antibodies, gene delivery vectors, signaling molecules, hormones, and other proteins, are typically manufactured recombinantly in bacteria, yeast, or mammalian host cells. Numerous downstream purification steps are then required in order to meet acceptable standards of purity (e.g., standards set by the FDA or other regulatory bodies). Host cell proteins, nucleic acids, endotoxins, and viruses are often the main contaminants that must be removed from biologic preparations.

[0005] Additionally, for a biologic to remain active, it must maintain its structure. A number of factors may cause a biologic to lose activity, including salt, temperature, lyophilization, oxidative conditions, pH, light, agitation, the orientation of the biologic during storage, freeze-thaw, and a tendency of the biologic to aggregate.

[0006] There is a need in the art for improved compositions and methods for manufacturing, purifying, and stabilizing biologics.

### SUMMARY

[0007] In some embodiments, provided herein is a fusion protein comprising a first polypeptide and a second polypeptide, wherein the second polypeptide has phase behavior. In some embodiments, the first polypeptide comprises i) an enzyme, or a derivative or catalytic fragment thereof; ii) an antibody, or a derivative or antigen-binding fragment thereof; iii) a signaling molecule, or a fragment or derivative thereof; iv) a structural protein, or a fragment or derivative thereof; or v) a hormone, or a fragment or derivative thereof.

[0008] In some embodiments, provided herein is a method for performing a multi-step enzymatic process on a substrate, the method comprising: i) providing a first fusion protein comprising a first enzyme and a polypeptide having a first phase behavior; ii) providing a second fusion protein comprising a second enzyme and polypeptide having a second phase behavior; iii) applying a first environmental factor, which allows the first enzyme to contact, isolate, and/or concentrate the substrate; and iv) applying a second environmental factor, which allows the second enzyme to contact, isolate, and/or concentrate the substrate.

[0009] In some embodiments, provided herein is a method for contacting, isolating, and/or purifying a substrate, the method comprising: i) providing a first fusion protein comprising a first enzyme and a polypeptide having a first phase behavior; ii) providing a second fusion protein comprising a second enzyme and polypeptide having a second phase behavior; iii) applying a first environmental factor, which allows the first enzyme to contact, isolate, and/or concentrate the substrate; and iv) applying a second environmental factor, which allows the second enzyme to contact, isolate, and/or concentrate the substrate.

[0010] In some embodiments, provided herein is a method for purifying a first polypeptide, the method comprising: i) providing a fusion protein comprising the first polypeptide and a second polypeptide having phase behavior; ii) applying a first environmental factor to the fusion protein; iii) separating the fusion protein aggregates from at least one contaminant on the basis of size and/or density; and iv) applying a second environmental factor to disaggregate the fusion protein.

[0011] In some embodiments, provided herein is a method for performing a multi-step enzymatic process on a substrate, the method comprising: i) providing a first fusion protein comprising a first enzyme and a polypeptide having a first phase behavior; ii) providing a second fusion protein comprising a second enzyme and polypeptide having a second phase behavior; iii) applying a first environmental factor, which allows the first enzyme to contact the substrate; and iv) applying a second environmental factor, which allows the second enzyme to contact the substrate.

[0012] In some embodiments, provided herein is a method for improving yield of a first polypeptide, the method comprising: i) expressing a fusion protein comprising the first polypeptide and a second polypeptide having phase behavior; and ii) separating the first polypeptide from the second polypeptide, wherein the yield of the first polypeptide is improved when expressed as the fusion protein compared to a yield of the first polypeptide when not expressed as a fusion protein.

[0013] In some embodiments, provided herein is a method for substantially preventing loss of activity of a first polypeptide after exposure to one or more conditions known to unfold, degrade, and/or misfold the first polypeptide, the method comprising expressing a fusion protein comprising the first polypeptide and a second polypeptide, wherein the second polypeptide is a polypeptide having phase behavior.

[0014] In some embodiments, provided herein is a method for substantially preventing the unfolding, degradation, and/or misfolding of a first polypeptide, the method comprising expressing a fusion protein comprising the first polypeptide and a second polypeptide, wherein the second polypeptide is a polypeptide having phase behavior.

[0015] In some embodiments, provided herein is a method for stabilizing a first polypeptide, the method comprising expressing a fusion protein comprising the first polypeptide and a second polypeptide, wherein the second polypeptide is a polypeptide having phase behavior, wherein when the fusion protein is exposed to one or more conditions that would destabilize the first polypeptide, the first polypeptide substantially retains its activity.

[0016] In embodiments, the method comprises removing the fusion protein from the conditions and cleaving the first polypeptide from the second polypeptide, wherein the first polypeptide retains its activity compared to a control first polypeptide that has not been exposed to the conditions.

[0017] In embodiments, the one or more conditions that unfold, degrade, misfold, or destabilize the first polypeptide comprise: exposure to an oxidizing agent, lyophilization, exposure to non-physiologic pH, exposure to a chaotropic agent, exposure to temperature of at least 50° C., exposure to an organic solvent, exposure to urea, exposure to a detergent, exposure to an autoclave, freeze-thaw cycling, heat shock, or a combination thereof.

[0018] In embodiments, the one or more conditions that unfold, degrade, misfold, or destabilize the first polypeptide comprise: exposure to non-physiologic pH. In embodiments, exposure to non-physiologic pH is exposure to acid. In embodiments, the acid is guanidine hydrochloride. In embodiments, exposure to non-physiologic pH is exposure to base. In embodiments, the base is sodium hydroxide or urea.

[0019] In embodiments, the one or more conditions known to unfold, degrade, misfold, or destabilize the first polypeptide are exposure to guanidine hydrochloride, exposure to urea, lyophilization, freeze-thaw cycling, autoclaving, exposure to sodium hydroxide, or exposure to temperature of at least 90° C. In embodiments, the one or more conditions known to unfold, degrade, misfold, or destabilize the first polypeptide is exposure to 0.1 M NaOH. In embodiments, the one or more conditions known to unfold, degrade, misfold, or destabilize the first polypeptide is exposure to 0.1 M NaOH for 30 minutes. In embodiments, the one or more conditions known to unfold, degrade, or destabilize the first polypeptide is exposure to 6 M guanidine hydrochloride. In embodiments, the one or more conditions known to unfold, degrade, misfold or destabilize the first polypeptide is exposure to 6 M guanidine hydrochloride for 30 minutes. In embodiments, the one or more conditions known to unfold, degrade, misfold or destabilize the first polypeptide is heating to at least 95° C. In embodiments, the condition is heat shock, and wherein heat shock comprises: heating the fusion protein comprising the first polypeptide to 95° C. for 30 minutes; placing a container containing the fusion protein on ice, and then returning the fusion protein to room temperature.

[0020] In embodiments, the fusion protein comprising the first polypeptide is exposed to the one or more conditions for about 15 minutes, about 30 minutes, about 45 minutes, about 1 hour, about 2 hours, about 3 hours, about 4 hours, about 5 hours, about 6 hours, about 7 hours, about 8 hours, about 9 hours, about 10 hours, about 11 hours, about 12 hours, about 13 hours, about 14 hours, about 15 hours, about 16 hours, about 17 hours, about 18 hours, about 19 hours, about 20 hours, about 21 hours, about 22 hours, about 23 hours, or about 24 hours. In embodiments, exposure to the one or more conditions occurs for at least about 30 minutes. In embodiments, exposure to the one or more conditions occurs for about 30 minutes to about 12 hours, about 30 minutes to about 11 hours, about 30 minutes to about 10 hours, about 30 minutes to about 9 hours, about 30 minutes to about 8 hours, about 30 minutes to about 7 hours, about 30 minutes to about 6 hours, about 30 minutes to about 5 hours, about 30 minutes to about 4 hours, about 30 minutes to about 3 hours, about 30 minutes to about 2 hours, or about 30 minutes to about 1 hours.

[0021] In embodiments, the activity of the first polypeptide is its affinity for a binding partner of the first polypeptide. In embodiments, the first polypeptide is an enzyme, and the activity is k_{cat}.

[0022] In embodiments, less than 35%, less than 30%, less than 25%, less than 20%, less than 15%, less than 10%, less than 5%, less than 3%, less than 2%, or less than 1% of the activity of the first polypeptide is lost after exposure to one or more of the conditions as compared to a control, wherein the control is not exposed to a condition known to unfold, degrade, or destabilize the first polypeptide. In embodiments, the first polypeptide retains from 65% to 100% of its activity after exposure to one or more of the conditions as compared to a control. In embodiments, the first polypeptide retains at least 65%, at least 70%, at least 75%, at least 80%, at least 85%, at least 90%, at least 95%, or 100% of the its activity after exposure to one or more of the conditions as compared to a control. In embodiments, less than 20% or less than 25% of the activity of the first polypeptide is lost after exposure to one or more of the conditions as compared to a control, wherein the control is not exposed to a condition known to unfold, degrade, or destabilize the first polypeptide. In embodiments, the first polypeptide retains at least 80% of its activity after exposure to one or more of the conditions as compared to a control compared control. In embodiments, the first polypeptide retains its activity at 4° C. for about 1 week, about 2 weeks, about 3 weeks, about 4 weeks, about 5 weeks, about 6 weeks, about 7 weeks, about 8 weeks, about 9 weeks, about 10 weeks, about 11 weeks, about 12 weeks, about 1 month, about 2 months, about 3 months, about 4 months, about 5 months, about 6 months, about 7 months, about 8 months, about 9 months, about 10 months, about 11 months or about 12 months. In embodiments, the first polypeptide retains its activity at −20° C. for about 6 months, about 9 months, about 1 year, about 2 years, about 3 years, about 4 years, about 5 years, about 6 years, about 7 years, about 8 years, about 9 years, or about 10 years.

[0023] In embodiments, the yield of the first polypeptide is greater than 15 mg per liter, greater than 30 mg per liter, greater than 50 mg per liter, greater than 75 mg per liter, greater than 100 mg per liter, greater than 200 mg per liter, or greater than 300 mg per liter of host cell suspension. In embodiments, the yield of the first polypeptide in the fusion protein is at least about 50%, at least about 75%, at least about 100%, at least about 125%, at least about 150%, at least about 175%, at least about 200%, at least about 225%, at least about 250%, at least about 275%, at least about 300%, at least about 325%, at least about 350%, at least about 375%, at least about 400%, at least about 425%, at least about 450%, at least about 475%, at least about 500%, at least about 525%, at least about 550%, at least about 575%, at least about 600%, at least about 625%, at least about 650%, at least about 675%, at least about 700%, at least about 725%, at least about 750%, at least about 775%, at least about 800%, at least about 825%, at least about 850%, at least about 875%, at least about 900%, at least about 925%, at least about 950%, at least about 975%, at least about 1000%, at least about 1100%, at least about 1125%, at least about 1150%, at least about 1175%, at least about 1200%, at least about 1225%, at least about 1250%, at least about 1275%, at least about 1300%, at least about 1325%, at least about 1350%, at least about 1375%, at least about 1400%, at least about 1425%, at least about 1450%, at least about 1475%, at least about 1500%, at least about 1525%, at least about 1550%, at least about 1575%, at least about 1600%, at least about 1625%, at least about 1650%, at least about 1675%, at least about 1700%, at least about 1725%, at least about 1750%, at least about 1775%, at least about 1800%, at least about 1825%, at least about 1850%, at least about 1875%, at least about 1900%, at least about 1925%, at least about 1950%, at least about 1975%, or at least about 2000% higher than the yield of a first polypeptide when not expressed as a fusion protein. In embodiments, the yield of the first polypeptide is greater than 75 mg per liter. In embodiments, the yield of the first polypeptide is about 300% higher than the yield of a first polypeptide that is not expressed as a fusion protein.

[0024] In embodiments, provided herein is a method for performing an enzymatic process on a nucleic acid substrate, the method comprising: (i) providing a first fusion protein comprising a first enzyme and a first polypeptide having a phase behavior; and (ii) applying a first environmental factor, which allows the first enzyme to contact the substrate. In some embodiments, the method comprises: (iii) providing a second fusion protein comprising a second enzyme and a second polypeptide having phase behavior; (iv) applying a second environmental factor, which allows the second enzyme to contact the substrate. In embodiments, the method comprises: (v) applying a third environmental factor, which separates the first enzyme from the substrate; and (vi) applying a fourth environmental factor, which separates the second enzyme from the substrate. In embodiments, the first enzyme, second enzyme, or both comprises a nucleic acid binding protein (NBP).

[0025] These and other embodiments will be further described below in the Detailed Description, Examples, and Claims.

### BRIEF DESCRIPTION OF THE DRAWINGS

[0026] FIG. 1 is a graph showing percent fusion protein activity after treatment with various conditions known to unfold, degrade, or misfold proteins including lyophilization, exposure to 0.1M sodium hydroxide (NaOH), 6M guanidine hydrochloride (GuHCl), and even heating to 95° C.

[0027] FIG. 2 shows percent fusion protein activity after lyophilization and resuspension in PBS (Untreated), or after lyophilization, autoclaving, and resuspension in PBS (Autoclaved).

[0028] FIG. 3 shows percent fusion protein loss after exposure to 0.1M sodium hydroxide, heating to 95° C., and heating to 95° C. at low pH (i.e., pH of 4). After treatment, the fusion protein in each exposure group was neutralized and/or cooled, centrifuged to remove aggregates, and then assayed for total protein using a commercial ELISA. For each group, less than 2% of the starting protein material was lost. Data represent the mean and standard error (n=3).

[0029] FIGS. 4A-C shows that a fusion protein comprising the PKD2 domain of the AAV receptor (AAVR) and a polypeptide with phase behavior has superior expression to expression of the PKD2 domain of AA VR in the absence of the polypeptide with phase behavior. FIG. 4A shows the concentrations of PKD2 and fusion protein comprising PKD2 purified per liter. FIG. 4B shows the amount of PKD2 and fusion protein comprising PKD2 purified per liter. FIG. 4C shows expression of PKD2 and the fusion protein comprising PKD2 on a gel.

[0030] FIG. 5 shows that a fusion protein comprising the CR3 domain of the LDL Receptor (LDLR) and a polypeptide with phase behavior retains its ability to capture lentivirus after exposure to conditions known to degrade, aggregate, or inactivate polypeptides (e.g., 95° C., 0.1M NaOH incubation, or 6M GuHCl incubation).

### DETAILED DESCRIPTION OF THE INVENTION

### Definitions

[0031] As used herein, and in the appended claims, the singular forms “a”, “an”, and “the” include plural referents unless the context clearly dictates otherwise. Thus, for example, reference to “a protein” can refer to one protein or to mixtures of such protein, and reference to “the method” includes reference to equivalent steps and/or methods known to those skilled in the art, and so forth.

[0032] As used herein, the term “about” or “approximately” when preceding a numerical value indicates the value plus or minus a range of 10%. For example, “about 100” encompasses 90 and 110.

[0033] Also as used herein, “and/or” refers to and encompasses any and all possible combinations of one or more of the associated listed items, as well as the lack of combinations when interpreted in the alternative (“or”).

[0034] Unless the context indicates otherwise, it is specifically intended that the various features described herein can be used in any combination.

[0035] Moreover, the present disclosure also contemplates that in some embodiments, any feature or combination of features set forth herein can be excluded or omitted. To illustrate further, if, for example, the specification indicates that a particular amino acid can be selected from A, G, I, L and/or V, this language also indicates that the amino acid can be selected from any subset of these amino acid(s) for example A, G, I or L; A, G, I or V; A or G; only L; etc., as if each such subcombination is expressly set forth herein. Moreover, such language also indicates that one or more of the specified amino acids can be disclaimed. For example, in particular embodiments the amino acid is not A, G or I; is not A; is not G or V; etc., as if each such possible disclaimer is expressly set forth herein.

[0036] An “adeno-associated virus” (AAV) is a small, replication-deficient parvovirus. As used herein, AAV may refer to a wildtype or mutant AAV of any one of the following serotypes: AAV1, AAV2, AAV3 (including types 3A and 3B), AAV4, AAV5, AAV6, AAV7, AAV8, AAV9, AAV10, AAV11, AAV12, AAV13, AAVrh32.33, AAVrh8, AAVrh10, AAVrh74, AAVhu.68, avian AAV, bovine AAV, canine AAV, equine AAV, ovine AAV, snake AAV, bearded dragon AAV, AAV218, AAV2g9, AAV-LK03, AAV7m8, AAV Anc80, AAV PHP.B, and any other AAV now known or later discovered. In some embodiments, an AAV may have a single-stranded genome, or a double-stranded genome (e.g., a self-complementary AAV).

[0037] An “AAV particle” typically comprises a capsid, and a nucleic acid (e.g., a nucleic acid comprising a transgene) encapsidated by the protein capsid. The “capsid” is a near-spherical protein shell that comprises individual “capsid protein subunits” or “capsid proteins” (e.g., about 60 capsid protein subunits) associated and arranged with T=1 icosahedral symmetry. Accordingly, the capsids of the AAV vectors described herein comprise a plurality of capsid proteins. When an AAV particle is described as comprising a capsid protein, it will be understood that the AAV particle comprises a capsid, wherein the capsid comprises one or more AAV capsid proteins. When an AAV particle is described as binding to a binding domain, it will be understood that the binding domain may bind to one or more capsid proteins within the capsid. The term “empty AAV particle” or “empty capsid” refers to an AAV particle or capsid that does not comprise any vector genome or nucleic acid comprising an expression cassette or transgene.

[0038] As used herein, the term “AAV sample” used interchangeably herein with “AAV composition” refers to a composition that contains AAV particles. In some embodiments, the “AAV sample” refers to a composition containing AAV of one or more serotypes. For example, an “AAV8 sample” refers to a composition comprising AAV8 particles.

[0039] A “viral particle” typically comprises a protein shell (e.g., a capsid or an envelope), and a nucleic acid (e.g., a nucleic acid comprising a transgene) contained therein.

[0040] As used herein, the term “fragment” as it refers to a polypeptide includes a truncated form of polypeptide. The fragment has substantially the same activity as the full length protein or polypeptide. For example, a fragment of a nucleic acid binding protein refers to a truncated form of the nucleic acid binding protein that substantially retain its binding affinity for the nucleic acid. As an additional example, a fragment of may include about 10%, about 15%, about 20%, about 25%, about 30%, about 35%, about 40%, about 45%, about 50%, about 55%, about 60%, about 65%, about 70%, about 75%, about 80%, about 85%, about 90%, about 95%, about 97%, or about 99% of the amino acids of full-length protein. As used herein, the term “substantially” in reference to an activity, such as binding affinity, means that the truncated form as at least 50%, at least 55%, at least 60%, at least 65%, at least 70%, at least 75%, at least 80%, at least 85%, at least 90%, at least 91%, at least 92%, at least 93%, at least 94%, at least 95%, at least 96%, at least 97%, at least 98%, at least 99%, or 100% of the activity (e.g., binding affinity) as the full length protein or polypeptide.

[0041] As used herein, the term “contaminant” and “impurity” are used interchangeably. A contaminant may refer to any substance that is not desired in a purified composition. In some embodiments, the contaminant is any substance other than the biologic desired to be purified. Non-limiting examples of contaminants include, but are not limited to, a solvent, a protein, a peptide, a carbohydrate, a nucleic acid, a virus, a cell (e.g., a bacterial, yeast, or mammalian cell), a carbohydrate, a lipid, or a lipopolysaccharide. In some embodiments, the contaminant is an endotoxin or a mycotoxin.

[0042] As used herein, the terms “peptide,” “polypeptide,” and “protein” are used interchangeably, and refer to a compound comprised of amino acid residues covalently linked by peptide bonds. A protein must contain at least two amino acids, and no limitation is placed on the maximum number of amino acids that can comprise a protein's sequence. The term “peptide” may refer to a short chain of amino acids including, for example, natural peptides, recombinant peptides, synthetic peptides, or a combination thereof. Proteins and peptides may include, for example, biologically active fragments, substantially homologous polypeptides, oligopeptides, homodimers, heterodimers, variants of polypeptides, modified polypeptides, derivatives, analogs, and fusion proteins, among others.

[0043] A “polynucleotide” is a sequence of nucleotide bases, and may be RNA, DNA or DNA-RNA hybrid sequences (including both naturally occurring and non-naturally occurring nucleotides). In some embodiments, a polynucleotide is either a single or double stranded DNA sequence.

[0044] As used herein, by “isolate” or “purify” (or grammatical equivalents) a viral particle, it is meant that the viral particle is at least partially separated from at least some of the other components in a starting material comprising the viral particle (e.g., a cell lysate). In representative embodiments an “isolated” or “purified” viral particle is enriched by at least about 10-fold, about 100-fold, about 1000-fold, about 10,000-fold or more as compared with the starting material.

[0045] As used herein, the term “amino acid” encompasses any naturally occurring amino acid, modified forms thereof, and synthetic amino acids. Naturally occurring, levorotatory (L-) amino acids are shown in Table 1.

TABLE 1
Amino acid residues and abbreviations.

Abbreviation

| | Three-Letter | One-Letter |
|---|---|---|
| Amino Acid Residue | Code | Code |
| Alanine | Ala | A |
| Arginine | Arg | R |
| Asparagine | Asn | N |
| Aspartic acid (Aspartate) | Asp | D |
| Cysteine | Cys | C |
| Glutamine | Gln | Q |
| Glutamic acid (Glutamate) | Glu | E |
| Glycine | Gly | G |
| Histidine | His | H |
| Isoleucine | Ile | I |
| Leucine | Leu | L |
| Lysine | Lys | K |
| Methionine | Met | M |
| Phenylalanine | Phe | F |
| Proline | Pro | P |
| Serine | Ser | S |
| Threonine | Thr | T |
| Tryptophan | Trp | W |
| Tyrosine | Tyr | Y |
| Valine | Val | V |

[0046] Alternatively, the amino acid can be a modified amino acid residue (nonlimiting examples are shown in Table 2) and/or can be an amino acid that is modified by post-translational modification (e.g., acetylation, amidation, formylation, hydroxylation, methylation, phosphorylation or sulfatation).

TABLE 2
Modified Amino Acid Residues.

| | |
|---|---|
| Modified Amino Acid Residue | Abbreviation |

Amino Acid Residue Derivatives

| | |
|---|---|
| 2-Aminoadipic acid | Aad |
| 3-Aminoadipic acid | bAad |
| beta-Alanine, beta-Aminoproprionic acid | bAla |
| 2-Aminobutyric acid | Abu |
| 4-Aminobutyric acid, Piperidinic acid | 4Abu |
| 6-Aminocaproic acid | Acp |
| 2-Aminoheptanoic acid | Ahe |
| 2-Aminoisobutyric acid | Aib |
| 3-Aminoisobutyric acid | bAib |
| 2-Aminopimelic acid | Apm |
| t-butylalanine | t-BuA |
| Citrulline | Cit |
| Cyclohexylalanine | Cha |
| 2,4-Diaminobutyric acid | Dbu |
| Desmosine | Des |
| 2,21-Diaminopimelic acid | Dpm |
| 2,3-Diaminoproprionic acid | Dpr |
| N-Ethylglycine | EtGly |
| N-Ethylasparagine | EtAsn |
| Homoarginine | hArg |
| Homocysteine | hCys |
| Homoserine | hSer |
| Hydroxylysine | Hyl |
| Allo-Hydroxylysine | aHyl |
| 3-Hydroxyproline | 3Hyp |
| 4-Hydroxyproline | 4Hyp |
| Isodesmosine | Ide |
| allo-Isoleucine | aIle |
| Methionine sulfoxide | MSO |
| N-Methylglycine, sarcosine | MeGly |
| N-Methyl isoleucine | MeIle |
| 6-N-Methyllysine | MeLys |
| N-Methylvaline | MeVal |
| 2-Naphthylalanine | 2-Nal |
| Norvaline | Nva |
| Norleucine | Nle |
| Ornithine | Orn |
| 4-Chlorophenylalanine | Phe(4-C1) |
| 2-Fluorophenylalanine | Phe(2-F) |
| 3-Fluorophenylalanine | Phe(3-F) |
| 4-Fluorophenylalanine | Phe(4-F) |
| Phenylglycine | Phg |
| Beta-2-thienylalanine | Thi |

[0047] Further, the non-naturally occurring amino acid can be an “unnatural” amino acid.

[0048] As used herein, the term “environmental factor” is any factor that, when applied to a composition comprising a protein-based purification matrix, alters one or more properties of the composition. Non-limiting examples of environmental factors include a change in one or more of temperature, pH, salt concentration, concentration of the purification matrix, concentration of the biologic, or pressure; the addition of one or more surfactants, cofactors, vitamins, molecular crowding agents, denaturing agents, reducing agents, or oxidizing agents; or the application of electromagnetic waves.

[0049] As used herein, the term “polypeptide with phase behavior” refers to any polypeptide that is capable of undergoing a phase transition. In some embodiments, the polypeptide undergoes a phase transition due to the application of an environmental factor. Exemplary polypeptides with phase behavior include elastin-like polypeptides (ELPs) and resilin-like polypeptides (RLPs).

[0050] As used herein, the term “fusion protein” refers to a polypeptide produced when two heterologous nucleotide sequences or fragments thereof coding for two (or more) different polypeptides not found fused together in nature are fused together in the correct translational reading frame.

[0051] The term “antibody” refers to an immunoglobulin (Ig) molecule capable of binding to a specific target, such as a carbohydrate, polynucleotide, lipid, or polypeptide, through at least one epitope recognition site located in the variable region of the Ig molecule. As used herein, the term encompasses intact polyclonal or monoclonal antibodies and antigen-binding fragments thereof. For example, a native immunoglobulin molecule is comprised of two heavy chain polypeptides and two light chain polypeptides. Each of the heavy chain polypeptides associate with a light chain polypeptide by virtue of interchain disulfide bonds between the heavy and light chain polypeptides to form two heterodimeric proteins or polypeptides (i.e., a protein comprised of two heterologous polypeptide chains). The two heterodimeric proteins then associate by virtue of additional interchain disulfide bonds between the heavy chain polypeptides to form an Ig molecule. The term “antibody” also includes multispecific antibodies (e.g., bispecific antibodies).

[0052] The term “antigen-binding fragment” as used herein refers to a polypeptide fragment that contains at least one complementarity-determining region (CDR) of an immunoglobulin heavy and/or light chain that binds to at least one epitope of the antigen of interest. In this regard, an antigen-binding fragment of the herein described antibodies may comprise 1, 2, 3, 4, 5, or all 6 CDRs of a variable heavy chain (VH) and variable light chain (VL) sequence from antibodies that specifically bind to a target molecule. Antigen-binding fragments include proteins that comprise a portion of a full length antibody, generally the antigen binding or variable region thereof, such as Fab, F(ab′)2, Fab′, Fv fragments, minibodies, diabodies, single domain antibodies (dAb), single-chain variable fragments (scFv), multispecific antibodies formed from antibody fragments, and any other modified configuration of the immunoglobulin molecule that comprises an antigen-binding site or fragment of the required specificity.

[0053] As used herein, the term “complementarity determining region” or “CDR” refer to an immunoglobulin (antibody) molecule. There are three CDRs per variable domain: CDR1, CDR2 and CDR3 in the variable domain of the light chain and CDR1, CDR2 and CDR3 in the variable domain of the heavy chain.

[0054] The term “F(ab′)2” refers to a protein fragment of IgG generated by proteolytic cleavage by the enzyme pepsin. Each F(ab′)2 fragment comprises two F(ab′) fragments linked by disulfide bonds in the hinge region and is therefore a bivalent antigen-binding fragment. The term “Fab”′ refers to a fragment derived from F(ab′)2 and may contain a small portion of the Fc. Each Fab′ fragment is a monovalent antigen-binding fragment.

[0055] The term “F(ab)” refers to two of the protein fragments resulting from proteolytic cleavage of IgG molecules by the enzyme papain. Each F(ab) comprises a covalent heterodimer of the VH chain and VL chain and includes an intact antigen-binding site. Each F(ab) is a monovalent antigen-binding fragment.

[0056] An “Fv fragment” refers to a non-covalent VH::VL heterodimer which includes an antigen-binding site that retains much of the antigen recognition and binding capabilities of the native antibody molecule, but lacks the CHI and CL domains contained within a Fab. Inbar et al. (1972) Proc. Nat. Acad. Sci. USA 69:2659-2662; Hochman et al. (1976) Biochem 15:2706-2710; and Ehrlich et al. (1980) Biochem 19:4091-4096.

[0057] Binding affinity (Ka) refers to an equilibrium association of a particular interaction expressed in the units of 1/M or M⁻¹. Alternatively, affinity can be defined as an equilibrium dissociation constant (Kd) of a particular binding interaction with units of M. Affinities can be readily determined using conventional techniques (see, e.g., Scatchard et al. (1949) Ann. N.Y. Acad. Sci. 51:660; and U.S. Pat. Nos. 5,283,173, 5,468,614, or the equivalent).

### Fusion Proteins

[0058] In some embodiments, the disclosure provides a fusion protein comprising a first polypeptide and a second polypeptide, wherein the second polypeptide has phase behavior. In embodiments, the first polypeptide is an enzyme. In some embodiments, the first polypeptide is any polypeptide having therapeutic, cosmetic, or industrial interest. Also provided herein are methods of stabilizing, purifying, and producing the first polypeptide.

### First Polypeptide

[0059] In some embodiments, the disclosure provides a fusion protein comprising a first polypeptide. The first polypeptide may be, for example, any polypeptide having therapeutic, cosmetic, or industrial interest. In some embodiments, the first polypeptide is i) an enzyme, or a catalytic fragment thereof; ii) an antibody, or a antigen-binding fragment thereof; iii) a signaling molecule, or a fragment thereof; iv) a structural protein, or a fragment thereof; v) a hormone, vi) a nucleic acid binding protein (NBP), or a fragment thereof; vii) a therapeutic, or a fragment thereof; viii) a carrier protein, or a fragment thereof; ix) a cytokine, or a fragment thereof; or x) a toxin, or a fragment thereof.

[0060] In some embodiments, the first polypeptide is a carrier protein. In embodiments, the carrier protein is selected from: human transcription factor TAF12 (TAF12), ketosteroid isomerase (KSI), maltose binding protein (MBP), beta-galactosidase (β-Gal), glutathione-S-transferase (GST) thioredoxin (Trx), chitin binding domain (CBD), BMP-2 mutant (BMPM), SUMO, CAT, TrpE, Staphylococcal protein A′ streptococcal protein, starch binding protein, cellulose binding domain of endoglucanase A, cellulose binding domain of exoglucanase Cex, biotin binding domain, recA, Flag, poly (His), poly(Arg), poly(Asp), poly(Gln), poly(Phe), poly(Cys), green fluorescent protein, red fluorescent protein, yellow fluorescent protein, cyan fluorescent protein, biotin, anti-Biotin, streptavidin, antibody epitopes, albumin, bovine serum albumin, keyhole limpet hemocyanin, and mutants and fragments thereof. In embodiments, the carrier protein is albumin. In embodiments, the carrier protein is bovine serum albumin.

[0061] In embodiments, the first polypeptide is a therapeutic. Non-limiting examples of therapeutics include antibodies, cytokines, lepirudin, cetuximab, dornase alfa, denileukin diftitox, etanercept, bivalirudin, leuprolide, alteplase, interferon alfa-n1, darbepoetin alfa, reteplase, epoetin alfa, salmon calcitonin, interferon alfa-n3, pegfilgrastim, sargramostim, secretin, peginterferon alfa-2b, asparaginase, thyrotropin alfa, antihemophilic factor, anakinra, gramicidin D, intravenous immunoglobulin, anistreplase, insulin (regular), tenecteplase, menotropins, interferon gamma-1 b, interferon alfa-2a (recombinant), coagulation factor Vila, oprelvekin, palifermin, glucagon (recombinant), aldesleukin, botulinum toxin Type B, omalizumab, lutropin alfa, insulin lispro, insulin glargine, collagenase, rasburicase, adalimumab, imiglucerase, abciximab, alpha-1-proteinase inhibitor, pegaspargase, interferon beta-1a, pegademase bovine, human serum albumin, eptifibatide, serum albumin iodinated, infliximab, follitropin beta, vasopressin, interferon beta-1 b, hyaluronidase, rituximab, basiliximab, muromonab, digoxin immune Fab (ovine), ibritumomab, daptomycin, tositumomab, pegvisomant, botulinum toxin type A, pancrelipase, streptokinase, alemtuzumab, alglucerase, capromab, laronidase, urofollitropin, efalizumab, serum albumin, choriogonadotropin alfa, antithymocyte globulin, filgrastim, coagulation factor IX, becaplermin, agalsidase beta, interferon alfa-2b, oxytocin, enfuvirtide, palivizumab, daclizumab, bevacizumab, arcitumomab, eculizumab, panitumumab, ranibizumab, idursulfase, alglucosidase alfa, exenatide, mecasermin, pramlintide, galsulfase, abatacept, cosyntropin, corticotropin, insulin aspart, insulin detemir, insulin glulisine, pegaptanib, nesiritide, thymalfasin, defibrotide, natural alpha interferon/multiferon, glatiramer acetate, preotact, teicoplanin, canakinumab, ipilimumab, sulodexide, tocilizumab, teriparatide, pertuzumab, rilonacept, denosumab, liraglutide, golimumab, belatacept, buserelin, velaglucerase alfa, tesamorelin, brentuximab vedotin, taliglucerase alfa, belimumab, aflibercept, asparaginase Erwinia chrysanthemi, ocriplasmin, glucarpidase, teduglutide, raxibacumab, certolizumab pegol, insulin isophane, epoetin zeta, obinutuzumab, fibrinolysin aka plasmin, follitropin alpha, romiplostim, lucinactant, natalizumab, aliskiren, ragweed pollen extract, secukinumab, somatotropin (recombinant), drotrecogin alfa, alefacept, OspA lipoprotein, urokinase, abarelix, sermorelin, aprotinin, gemtuzumab ozogamicin, satumomab pendetide, albiglutide, antithrombin alfa, antithrombin III (human), asfotase alfa, atezolizumab, autologous cultured chondrocytes, beractant, blinatumomab, C1 esterase inhibitor (human), coagulation factor XIII A-subunit (recombinant), conestat alfa, daratumumab, desirudin, dulaglutide, elosulfase alfa, evolocumab, fibrinogen concentrate (human), filgrastim-sndz, gastric intrinsic factor, hepatitis B immune globulin, human calcitonin, human Clostridium tetani toxoid immune globulin, human rabies virus immune globulin, human Rho(D) immune globulin, human Rho(D) immune globulin, hyaluronidase (human, recombinant), idarucizumab, immune globulin (human), vedolizumab, ustekinumab, turoctocog alfa, tuberculin purified protein derivative, simoctocog alfa, siltuximab, sebelipase alfa, sacrosidase, ramucirumab, prothrombin complex concentrate, poractant alfa, pembrolizumab, peginterferon beta-1a, ofatumumab, obiltoxaximab, nivolumab, necitumumab, metreleptin, methoxy polyethylene glycol-epoetin beta, mepolizumab, ixekizumab, insulin degludec, insulin (porcine), insulin (bovine), thyroglobulin, anthrax immune globulin (human), anti-inhibitor coagulant complex, brodalumab, C1 esterase inhibitor (recombinant), chorionic gonadotropin (human), chorionic gonadotropin (recombinant), coagulation factor X (human), dinutuximab, efmoroctocog alfa, factor IX complex (human), hepatitis A vaccine, human varicella-zoster immune globulin, ibritumomab tiuxetan, lenograstim, pegloticase, protamine sulfate, protein S (human), sipuleucel-T, somatropin (recombinant), susoctocog alfa and thrombomodulin alfa.

[0062] In some embodiments, the first polypeptide is a growth factor, such as basic fibroblast growth factor (bFGF), epidermal growth factor (EGF), insulin-like growth factor (IGF1), sonic hedgehog (SHH), bone morphogenic protein 2 (BMP2), glial cell-derived neurotrophic factor (GDNF), or noggin.

[0063] In some embodiments, the first polypeptide is a cytokine. In some embodiments, the first polypeptide is an interleukin, such as interleukin-1 (IL-1), interleukin-2 (IL-2), interleukin-3 (IL-3), interleukin-4 (IL-4), interleukin-5 (IL-5), interleukin-6 (IL-6), interleukin-7 (IL-7), interleukin-8 (IL-8), interleukin-9 (IL-9), interleukin-10 (IL-10), interleukin-11 (IL-11), interleukin-12 (IL-12), interleukin-13 (IL-13), interleukin-14 (IL-14), interleukin-15 (IL-15), interleukin-16 (IL-16), interleukin-17 (IL-17), interleukin-18 (IL-18), interleukin-19 (IL-19), interleukin-20 (IL-20) interleukin-21 (IL-21) interleukin-22 (IL-22) interleukin-23 (IL-23), interleukin-24 (IL-24), interleukin-25 (IL-25), interleukin-26 (IL-26), interleukin-27 (IL-27), interleukin-28 (IL-28), interleukin-29 (IL-29), interleukin-30 (IL-30), interleukin-31 (IL-31), interleukin-32 (IL-32), interleukin-33 (IL-33), interleukin-34 (IL-34), interleukin-35 (IL-35), interleukin-36 (IL-36), interleukin-37 (IL-37), interleukin-38 (IL-38), interleukin-39 (IL-39), or interleukin-40 (IL-40). In some embodiments, the cytokine is tumor necrosis factor alpha (TNF-alpha), interferon gamma (IFN-g), granulocyte-macrophage colony-stimulating factor (GM-CSF), or transforming growth factor beta (TGV-B).

[0064] In some embodiments, the first polypeptide is a receptor, or a receptor fragment. For example, the first polypeptide may be a cell-surface receptor, or an extracellular portion thereof (e.g., an ectodomain). In some embodiments, the receptor is an ion channel-linked receptor, an enzyme-linked receptor, or a G-protein coupled receptor. In some embodiments, the receptor may be a receptor tyrosine kinase, a tyrosine kinase associated receptor, a receptor-like tyrosine phosphatase, a receptor serine-threonine kinase, a receptor guanylyl cyclase, or a histidine kinase associated receptor.

[0065] In some embodiments, the first polypeptide is an enzyme, or a derivative or catalytic fragment thereof. The term “enzyme” as used herein includes proteins, or derivatives or fragments thereof, that are capable of catalyzing chemical changes in other substances without being changed themselves. Non-limiting example of enzymes include oxidoreductases, transferases, hydrolases, lyases, isomerases, ligases, hemicellulases, peroxidases, proteases, gluco-amylases, amylases, alkaline/acid phosphatases, isomerases, oxidases, xylanases, lipases, phospholipases, esterases, cutinases, pectinases, keratanases, reductases, phenoloxidases, lipoxygenases, ligninases, pullulanases, tannases, β-glucosidase, lamarinase, kinases, oxidorectuases, ligases, lysozyme, pentosanases, malanases, glucanases, arabinosidases, hyaluronidase, chondroitinase, dehydrogenase, decarboxylase, kinase, phytase, laccases, and derivatives thereof.

[0066] In some embodiments, the enzyme, or a derivative or catalytic fragment thereof, is isolated or derived from bacteria or fungi. In some embodiments, the enzyme, or a derivative or catalytic fragment thereof, is isolated or derived from a mammal.

[0067] In some embodiments, the enzyme, or a derivative or catalytic fragment thereof, is a naturally occurring enzyme. In some embodiments, the enzyme, or derivative or catalytic fragment thereof, comprises at least 1, at least 2, at least 3, at least 4, at least 5, at least 6, at least 7, at least 8, at least 9, at least 10, at least 11, at least 12, at least 13, at least 14, at least 15, at least 16, at least 17, at least 18, at least 19, at least 20, at least 21, at least 22, at least 23, at least 24, at least 25 or more amino acid mutations, as compared to the naturally occurring enzyme. In some embodiments, the enzyme, or derivative or catalytic fragment thereof, comprises an amino acid sequence with at least 90%, at least 95%, at least 97%, or at least 99% identity to the naturally occurring enzyme.

[0068] Unless otherwise indicated, sequence identity is determined using the National Center for Biotechnology Information (NCBI)'s Basic Local Alignment Search Tool (BLAST®), available at blast.ncbi.nlm.nih.gov/Blast.cgi. In some embodiments, the sequence identity is calculated over the entire length of the compared sequences. In some embodiments, the sequence identity is calculated over a 20-amino acid, 50-amino acid, 75-amino acid, 100-amino acid, 250-amino acid, 500-amino acid, 750-amino acid, or 1000-amino acid fragment of each compared sequence.

[0069] In some embodiments, the first polypeptide is an antibody, or a derivative or antigen-binding fragment thereof. In some embodiments, the antibody, is rituximab, trastuzumab, retifanlimab, amivantamab, ublituximab, anifrolumab, loncastuximab tesirine, balstilimab, bimekizumab, tralokinumab, evinacumab, sutimlimab, aducanumab, teplizumab, dostarlimab, tanezumab, inolimomab, oportuzumab monatox, narsoplimab, ansuvimab, margetuximab, naxitamab, atoltivimab, maftivimab, and odesivimab-ebgn, belantamab mafodotin, tafasitamab, satralizumab, inebilizumab, sacituzumab govitecan, teprotumumab, isatuximab, eptinezumab, [fam]-trastuzumab deruxtecan, enfortumab vedotin, crizanlizumab, brolucizumab, polatuzumab vedotin, risankizumab, romosozumab, caplacizumab, ravulizumab, emapalumab, cemiplimab, fremanezumab, moxetumomab pasudotox, galcanezumab, lanadelumab, mogamuizumab, erenumab, tildrakizumab, ibalizumab, burosumab, durvalumab, emicizumab, benralizumab, ocrelizumab, guselkumab, inotuzumab, ozogamicin, sarilumab, dupilumab, avelumab, brodalumab, atezolizumab, bezlotoxumab, olaratumab, reslizumab, obiltoxaximab, ixekizumab, daratumumab, elotuzumab, necitumumab, idarucizumab, alirocumab, mepolizumab, evolocumab, dinutuximab, secukinumab, nivolumab, blinatumomab, pembrolizumab, ramucirumab, vedolizumab, siltuximab, obinutuzumab, ado-trastuzumab emtansine, raxibacumab, pertuzumab, brentuximab vedotin, belimumab, ipilimumab, denosumab, tocilizumab, ofatumumab, canakinumab, golimumab, ustekinumab, certolizumab pegol, catumaxomab, eculizumab, ranibizumab, panitumumab, natalizumab, bevacizumab, cetuximab, efalizumab, omalizumab, tositumomab-i131, ibritumomab tiuxetan, adalimumab, alemtuzumab, gemtuzumab, ozogamicin, trastuzumab, infliximab, palivizumab, basiliximab, daclizumab, or a derivative or antigen-binding fragment thereof, with at least 90%, at least 95%, at least 97%, or at least 99% identity to any one of the aforementioned antibodies or antigen-binding fragments thereof. In some embodiments, the antibody or a derivative or antigen-binding fragment thereof, comprises at least 1, at least 2, at least 3, at least 4, at least 5, at least 6, at least 7, at least 8, at least 9, at least 10, at least 11, at least 12, at least 13, at least 14, at least 15, at least 16, at least 17, at least 18, at least 19, at least 20, at least 21, at least 22, at least 23, at least 24, at least 25 or more amino acid mutations, as compared to any one of the aforementioned antibodies or antigen-binding fragments thereof.

[0070] In some embodiments the first polypeptide is a signaling molecule, or a fragment or derivative thereof. The term “signaling molecule” refers to a protein that causes a cell to undergo a process that entails a defined sequence of biochemical reactions within the cell within a cell. Non-limiting examples of signaling molecules include receptor tyrosine kinases (e.g., G protein coupled receptors), nuclear hormone receptors, extracellular signal-regulated kinase (ERK), vaccinia virus (VHR) H1-related protein, a member of the mitogen-activated protein kinase (MKP) family of phosphatases, an interleukin, a cytokine, a transcriptional activator, or a transcription factor. In some embodiments, the signaling molecule, or a fragment or derivative thereof, is a naturally occurring signaling molecule. In some embodiments, the signaling molecule, or a fragment or derivative thereof, comprises at least 1, at least 2, at least 3, at least 4, at least 5, at least 6, at least 7, at least 8, at least 9, at least 10, at least 11, at least 12, at least 13, at least 14, at least 15, at least 16, at least 17, at least 18, at least 19, at least 20, at least 21, at least 22, at least 23, at least 24, at least 25 or more amino acid mutations, as compared to the naturally occurring signaling molecule, or a fragment or derivative thereof. In some embodiments, the signaling molecule, or a fragment or derivative thereof, comprises an amino acid sequence with at least 90%, at least 95%, at least 97%, or at least 99% identity to the naturally occurring signaling molecule, or a fragment or derivative thereof.

[0071] In some embodiments the first polypeptide is a structural protein, or a fragment or derivative thereof. The term “structural protein” refers to a class of non-catalytic proteins that may serve as a biological structural support. The proteins may serve as biological structural supports by themselves, in conjunction with other proteins, or as a matrix or support for other materials. Non-limiting examples of structural proteins include spider silks, porins (e.g., outer membrane porin F precursor), keratin, collagen, actin, actinin, aggrecan, biglycan, cadherin, clathrin, decorin, elastin, fibrinogen, fibrin, heparin, laminin, mucin, myelin associated glycoprotein, myelin basic protein, myosin, spectrin, tropomyosin, troponin, tubulin, vimentin, vitronectin, and recognin. In some embodiments, the aforementioned structural protein, or a fragment or derivative thereof, comprises at least 1, at least 2, at least 3, at least 4, at least 5, at least 6, at least 7, at least 8, at least 9, at least 10, at least 11, at least 12, at least 13, at least 14, at least 15, at least 16, at least 17, at least 18, at least 19, at least 20, at least 21, at least 22, at least 23, at least 24, at least 25 or more amino acid mutations, as compared to the naturally occurring structural protein, or fragment or derivative thereof. In some embodiments, the structural protein, or a fragment or derivative thereof, comprises an amino acid sequence with at least 90%, at least 95%, at least 97%, or at least 99% identity to the naturally occurring structural protein, or a fragment or derivative thereof.

[0072] In some embodiments the first polypeptide is a hormone, or a fragment or derivative thereof. The term “hormone” refers to a chemical released by a cell, gland, or organ in one part of an organism that sends out messages that affect cells in other parts of the organism. Non-limiting examples of hormones include thyrotropin-releasing hormone, corticotrophin-releasing hormone, growth-hormone releasing hormone (GHRH), dopamine, somatostatin, vasopressin, growth hormone, thyroid stimulating hormone, adrenocorticotrophic hormone (ACTH), follicle-stimulating hormone (FSH), melanocyte-stimulating hormone (MSH), luteinizing hormone (LH), prolactin, oxytocin, thymopoietin, IGF, THPO, androgens, glucocorticoids, aldosterone, adrenaline, noradrenaline, estrogen, progesterone, prolactin, relaxin, melatonin, calcitonin, PTH, gastrin, ghrelin, histamine, neuropeptide Y, insulin, glucagon, calcitriol, renin, erythropoietin, inhibin, and calcitonin. In some embodiments, the hormone is a growth factor.

[0073] In some embodiments, the first polypeptide is a mammalian polypeptide. The mammalian polypeptide may be a human polypeptide, a goat polypeptide, a rabbit polypeptide, a mouse polypeptide, a rat polypeptide, a primate polypeptide, or a baboon polypeptide.

[0074] In some embodiments, the first polypeptide is a viral polypeptide. Non-limiting examples of viral polypeptides include the gag protein, DNA polymerase, a protease, a capsid protein, an envelope polypeptide, a fusion polypeptide, and a spike protein. In some embodiments, the viral polypeptide is a capsid protein. In some embodiments, the viral polypeptide is an envelope protein. In some embodiments, the viral polypeptide is a spike protein. In some embodiments, the capsid protein is an AAV capsid protein. In some embodiments, the viral polypeptide is a bacteriophage polypeptide, such as T7 polymerase.

[0075] In some embodiments, the first polypeptide is a bacterial polypeptide, or derivative or fragment thereof. The term “bacterial polypeptide” refers to a polypeptide or protein naturally produced by bacteria or other microorganisms. In In some embodiment, the bacterial polypeptide is botulinum toxin, diphtheria toxin, anthrax toxin, pseudomonas exotoxin A, or Shiga toxin. In some embodiments, the bacterial polypeptide is Staphylococcus protein A (SPA) or protein L.

[0076] In some embodiments, the first polypeptide is a toxin. Non-limiting examples of toxins include the Heat labile toxin (LT), Heat stabile toxin (ST), Verotoxins, shiga-like toxins (Stxs), Cytotoxins, endotoxins (e.g., lipopolysaccharide (LPS)), EnteroAggregative ST toxin (EAST), Shigella enterotoxins 1 (ShET1), Shigella enterotoxins 2 (ShET2), Neurotoxin, Cytolethal distending toxins (Cdt), AvrA toxin, Cytotoxic necrotizing factors, murine toxin, cytolethal distending toxins, AvrA toxin, toxin complex, cytotoxin necrotizing factor, Yst toxin, heat stabile toxin, Shiga-like toxin II, leukotoxin, enterotoxin, a heat-stable like enterotoxin, extracellular toxic complex, hemolysin, pore-forming toxin, α-hemolysin, heat-stable like toxin, extracellular toxin complex (ETC), alpha-toxin, beta toxin, a neurotoxin, C2 toxin, tetanus neurotoxin, epsilon-toxin, tetanospasmin, lecithinase, cholera toxin, accessory cholera enterotoxin, repeats-in-toxin (RTX) toxin, C3 toxin, iota-toxin, theta-toxin, δ-hemolysin, δ-hemolysin, γ-hemolysin, panton-valentine leukocidin, staphylococcal enterotoxins, toxic shock syndrome toxin-1, zona occludens toxin, cholix toxin, Cholera toxins (CTx), accessory cholera enterotoxin (Ace), RTX toxin, zona occludens toxin (Zot), Cholix toxin, β-haemolysin/cytolysin, CAMP factor, Streptolysin O, Streptolysin S, Pneumolysin, an exotoxin, vacuolating cytotoxin A (VacA), Cytolytic toxins, exotoxin A, exotoxin S, exotoxin T, exotoxin U, exotoxin Y, phospholipase C, a Cry toxin, an anthrax toxin, cytolethal distending toxin A, cytolethal distending toxin B, cytolethal distending toxin C, cholera-like enterotoxin, adenylate cyclase toxin, pertussis toxin, tracheal cytosoxin, dermonecrotic toxin, diptheria toxin, Bacteroides fragilis toxin, and listerolysin O. In some embodiments, the toxin is botulinum toxin, diphtheria toxin, anthrax toxin, pseudomonas exotoxin A or Shiga toxin.

[0077] In some embodiments, the toxin is isolated from a bacteria, for example, a bacteria selected from any one of the genus: Yersinia Salmonella, Shigella, Escherichia, Enterobacter, Klebsiella, Serratia, Proteus, Citrobacter, Clostridium, Vibrio, Staphylococcus, Streptococcus, Helicobacter, Pseudomonas, Pasteurella, Bacillus, Campylobacter, Aeromonas, Neiserria, Bordetella, Haemophilus, Chlamydia, Corynebacteria, Bacteroides, Corynebacteria, and Listeria.

[0078] In some embodiments, the first polypeptide is an antigenic polypeptide. The term “antigenic polypeptide” refers to any polypeptide that elicits an immune response in an organism. In some embodiments, an antigenic polypeptide results in the development of a humoral and/or a cellular immune response to the antigenic polypeptide. In some embodiments, the antigenic polypeptide is a component of a vaccine. In some embodiments, the antigenic polypeptide is selected from hemagglutinin, spike protein, neuraminidase, hepatitis B surface antigen (HBsAg), a fusion protein, or a capsid protein. In some embodiments, the antigenic polypeptide is the spike protein from SARS-COV or the spike protein from SARS-COV-2.

[0079] In some embodiments, the first polypeptide is an enzyme capable of performing one or more steps involved in protein synthesis. Non-limiting examples of enzymes involved in protein synthesis include ribosomal proteins, such as proteins encoded by any one of the following genes: RPSA, RPS3, RPS3A, RPS4X, RPS4Y, RPS5, RPS6, RPS7, RPS8, RPS9, RPS10, RPS11, RPS12, RPS13, RPS14, RPS15, RPS 15A, RPS16, RPS17, RPS18, RPS19, RPS20, RPS21, RPS23, RPS24, RPS25, RPS26, RPS27, RPS27A, RPS28, RPS29, RPS30, RPL3 RPS14, RPL5, RPL6, RPL7, RPL7A, RPL8, RPL9, RPL10, RPL10A, RPL12, RPL13A, RPL14, RPL15, RPL17, RPL18, RPL18A, RPL19, RPL21, RPL22, RPL23, RPL23A, RPL24, RPL26, RPL27A, RPL30, RPL31, RPL32, RPL34, RPL25, RPL26, RPL36A, RPL37, RPL39, RPL50, RPP0, RPP1, RPP1.

[0080] In some embodiments, the first polypeptide participates in protein folding, such as a chaperone protein. Non-limiting examples of chaperone proteins include heat shock proteins such as Hsp70 (cpn60, GroEL), Hsp60 (DNAK, BiP), Hsp25, HSP90 (Clp), Calnexin, calreticulin, PDI, PPI, alpha-lytic protease, or subtilisin.

[0081] In some embodiments, the first polypeptide is an enzyme capable of performing one or more steps involved in protein modification. For example, the first polypeptide may be a kinase, a phosphatase, a methylase, a glycosyltransferase, an enzyme that adds or removes lipids, a capping enzyme, or a tailing enzyme. In some embodiments, the first polypeptide is involved in post-translational modification, such an enzyme involved in phosphorylation, glycosylation, S-nitrosylation, methylation, n-acetylation, palmitoylation, n-myristoylation, prenylation, sumoylation, or ubiquitination. In some embodiments, the first polypeptide is involved in phosphorylation, methylation, lipidation, capping, or tailing. In some embodiments, the first polypeptide is a kinase or a phosphorylase. In some embodiments, the enzyme is AMAN1, MGAT/GNT1, AMAN II, MGAT2/GNT II, MGAT3/GNT III, MGAT4A/GNT IV, MGAT5/GNT V, FUT8, B4GALT1, ST3GAL3, ST3GAL1, FUT11, XYLT, POMT1, POMT2, GALNT1, POFUT1, XYLT1, HPAT1, HPAT3, GALT2, SERGT1, or RRA1.

[0082] In some embodiments, the first polypeptide is an enzyme capable of performing one or more steps involved in DNA or RNA synthesis. For example, the first polypeptide may be a polymerase, such as a DNA or an RNA polymerase. In some embodiments, the first polypeptide may be a helicase.

[0083] In some embodiments, the first polypeptide is an enzyme capable of performing one or more steps involved in DNA or RNA modification. For example, the first polypeptide may be a Cas enzyme, such as Cas9 or Cas12. In some embodiments, the first polypeptide may be a Zn finger nuclease. In some embodiments, the first polypeptide may be a TALEN. In some embodiments, the first polypeptide may be a meganuclease. In some embodiments, the first polypeptide may be a deaminase.

[0084] In some embodiments, the first polypeptide is a nucleic acid binding protein (NBP). In some embodiments, the nucleic acid binding protein is an RNA binding protein (RBP). In some embodiments, the nucleic acid binding protein is a DNA binding protein (DBP). RBPs bind to RNA whereas DBPs bind to DNA. In embodiments, the NBP binds to DNA, a microRNA, capped RNA, DNA, double stranded RNA, transfer RNA, ribosomal RNA, a small nuclear RNA, a regulatory RNA, a ribozyme, a transfer RNA, or a messenger RNA.

[0085] In embodiments, the NBP binds to a poly A tail, a double stranded RNA, an AU-rich element (ARE), a positively charged intrinsically disordered region (IDR) of a nucleic acid, or an mRNA cap.

[0086] In embodiments, an RBP binds to an AU-rich element. AU-rich elements are referred to herein as “ARE”. An ARE refers to an adenylate-uridylate-rich element in the 5′ or 3′ untranslated region of a mRNA. AREs contain the core sequence AUUUA (SEQ ID NO: X). AREs are a determinant of RNA stability, and often occur in mRNAs of proto-oncogenes, nuclear transcription factors, and cytokines. Proteins that bind to ARE are referred to as ARE-binding proteins (ARE-BP). In embodiments, ARE-BP stabilize mRNA. Non-limiting examples of ARE-BP include human antigen R (huR, also called “ELAV”), tristetrapolin (TTP), AU-rich element RNA-binding protein (AUF), and fragile X mental retardation syndrome-related protein 1 (FXR1). The following articles describe ARE-BP and are incorporated by reference herein in their entirety: Otsuka et al. Front. Genet., 2 May 2019; Brennan and Steitz. Cell Mol Life Sci. 2001 February; 58(2):266-77; Carballo et al. 1998. Science, 281, 1001-1005; Mazan-Mamczarz et al. Oncogene volume 27, pages 6151-6163 (2008); Vasudevan and Steitz. Cell. 2007 Mar. 23; 128(6):1105-18; Curr Cancer Drug Targets. 2019; 19(5):382-399; J Biol Chem. 2017 Apr. 28; 292(17):6869-6881. doi: 10.1074/jbc.M116.772947. Epub 2017 Mar. 16; Wiley Interdiscip Rev RNA. July-August 2014; 5(4):549-64. doi: 10.1002/wrna.1230; and Elife. 2017 Aug. 2; 6:e26129. doi: 10.7554/eLife.26129; Mazan-Mamczarz et al. 2008. Nucleic Acids Research, 37, 204-214. In embodiments, an NBP binds to an ARE. In embodiments, the NBP binding to an ARE incorporates a binding element of huR, TTP, AUF, or FXR1.

[0087] In embodiments, an NBP binds to double stranded RNA. In embodiments, the NBP comprises a dsRNA binding protein (dsRBD) or a fragment thereof. dsRBDs are described in the following reference which is incorporated by reference herein in its entirety: Banerjee et al. RNA Biol. 2014 October; 11(10): 1226-1232.

[0088] In embodiments, an NBP binds to capped mRNA. In embodiments, the NBP binding to capped mRNA comprises eukaryotic translation initiation factor 4E (eIF4E), eukaryotic translation initiation factor3 Subunit D (eIF3D), or a combination thereof.

[0089] In embodiments, the NBP binds to a groove of DNA or RNA. Non-limiting examples of nucleic acid binding proteins that bind to the groove of DNA or RNA include the trans-activator of transcription (Tat) protein of human immunodeficiency virus-1 (HIV-1), the REV protein of HIV-1, and the RSG-1.2 peptide. RSG-1.2 peptide is a synthetic peptide which binds to the Rev responsive element present within the env gene of the HIV-1 genome. The RSG-1.2 peptide is described in the following article, which is incorporated by reference herein in its entirety: Kumar et al. PLOS One. 2011; 6(8):e23300.

[0090] In embodiments, the NBP binds to mRNA. In embodiments, the NBP that binds to mRNA is a ribosomal protein. In embodiments, the ribosomal protein is a 70S ribosome or a 80S ribosome. In embodiments, the ribosomal protein is from the 40S or 60S subunit of the 80S ribosome. In embodiments, the ribosomal protein is from the 30S or 50S subunit of the 70S ribosome. In embodiments, the ribosomal protein is selected from the group consisting of the L3 ribosomal protein, the L4 ribosomal protein, the L13 ribosomal protein, the L20 ribosomal protein, the L22 ribosomal protein, the L24 ribosomal protein, the L24e ribosomal protein, the S12 ribosomal protein, the S14 ribosomal protein, and the eukaryotic initiation factor 4E-binding protein 1 (4EBP1).

[0091] In embodiments, the NBP that binds to mRNA is part of the spliceosome. In embodiments, the NBP that is part of the spliceosome is a splicing factor. In embodiments, the splicing factor is selected from the ASF/SF2 splicing factor, serine/arginine rich splicing factor 4 (SRp75), and the serine and arginine rich splicing factor 1 (SRSF1).

[0092] In embodiments, the NBP that binds to mRNA is a protein that localizes to p-granules. In embodiments, the protein that localizes to a p-granule is selected from the group consisting of LAF-1, MEG-1, and MEG-3. LAF-1, MEG-1, and MEG-3 are described in the following references, which are incorporated by reference herein in their entirety: Leacock et al. Genetics, Volume 178, Issue 1, 1 Jan. 2008, Pages 295-306; Wu et al. Mol Biol Cell. 2019 Feb. 1; 30(3): 333-345; Elbaum-Garfinkle et al. Proc Natl Acad Sci USA. 2015 Jun. 9; 112(23):7189-94.

[0093] In embodiments, the NBP that binds to mRNA is a protein that removes or facilitates removal of the 5′ cap of mRNA, referred to herein as a “decapping protein.” In embodiments, the protein that removes or facilitates removal of the 5′ cap of mRNA is Dcp1, Dcp2, or a combination thereof. Dcp1 and Dcp2 are described in the following reference which is incorporated by reference herein in its entirety: Valkov et al. Nature Structural & Molecular Biology volume 23, pages 574-579 (2016).

[0094] In embodiments, the NBP that binds to mRNA is a component of a processing body (p-body). In embodiments, the component of a p-body is Edc3, DHX9, or Xrn1. Components of p-bodies are described in the following reference which is incorporated by reference herein in its entirety: Luo et al. Biochemistry 2018, 57, 17, 2424-2431.

[0095] In embodiments, the NBP that binds to mRNA is stem-loop binding protein (SLBP). SLBP binds to the histone 3′ untranslated region (UTR) stem loop structure in replication-dependent histone mRNAs. In embodiments, the NBP that binds to mRNA is a heterogenous nuclear ribonucleoprotein (hnRNP). hnRNPs are described in the following reference which is incorporated by reference herein in its entirety: Geuens et al. Hum Genet. 2016; 135: 851-867.

[0096] In embodiments, the NBP that binds to mRNA is GroEL.

[0097] In embodiments, the NBP is a protein involved in in vitro transcription. Non-limiting examples of NBPs involved in in vitro transcription include T7 RNA polymerase, Rnase inhibitor, 2′-O-Methyltransferase, Inorganic Pyrophosphatase, Poly(A) Polymerase, DNase I, Calf intestinal phosphatase, Antarctic phosphatase, D1 subunit of the Vaccinia virus mRNA capping enzyme, Guanine-7-methyltransferase (found in D1 subunit of the Vaccinia virus mRNA capping enzyme), Guanylyltransferase (found in D1 subunit of the Vaccinia virus mRNA capping enzyme), RNA triphosphatase (found in D1 subunit of the Vaccinia virus mRNA capping enzyme), and D12 subunit of vaccinia virus mRNA capping enzyme. The following references describe the aforementioned proteins and are incorporated by reference herein in their entirety: Dickson et al. Prog Nucleic Acid Res Mol Biol. 2005; 80: 349-374; Shuman et al. J Biol Chem. 1980 Dec. 10; 255 (23):11588-11598; Luo et al. J Virol. 1995 June; 69(6): 3852-3856; Kobori et al. PNAS Nov. 1, 1984 81 (21) 6691-6695.

[0098] In embodiments, the NBP is selected from the group consisting of poly(A)-binding protein (PABP), eukaryotic translation initiation factor 4E (eIF4E), eukaryotic translation initiation factor3 Subunit D (eIF3D), heterogenous nuclear ribonucleoproteins (hnRNPs), RNA-specific adenosine deaminase 1 (ADAR1), RNA-specific adenosine deaminase 2 (ADAR2), CspB from Bacillus subtilis (Bscscp), Y-box protein 1 cold shock domain (YB1-CSD), a Fox-1 protein (FOX1), poly(A)-binding protein (PABP), Staufen protein, TIS11d, zinc finger protein (ZNF), Z-DNA binding protein 1 (ZBP1), retinoic acid-inducible gene-I (RIG-I) like protein, toll like receptor 7 (TLR7), toll like receptor 8 (TLR3), toll like receptor 8 (TLR8), retinoic acid-inducible gene I (RIG-I), melanoma differentiation-associated protein 5 (MDA5), interferon induced protein with tetratricopeptide repeats 1 (IFIT1), protein kinase R (PKR), 2′-5′-oligoadenylate synthetase, an oligoadenylate synthase-like (OASL) protein (e.g., OAS1, OAS2, OAS3, or OASL), ribonuclease E (RNASE E), gamma-interferon-inducible protein Ifi-16 (IF116), and cyclic GMP-AMP synthase (cGAS). The following references describe select aforementioned proteins and are incorporated by reference herein in their entirety: Kuroyanagi. Cell Mol Life Sci. 2009; 66(24): 3895-3907; Baou et al. J Biomed Biotechnol. 2009; 2009: 634520; and Brisse and Ly. Front. Immunol., 17 Jul. 2019; 10: 1586; Rehwinkel et al. Nature Reviews Immunology volume 20, pages 537-551 (2020); and Brisse et al. Front Immunol. 2019; 10: 1586; Luo et al. Cell. 2011 Oct. 14; 147(2): 409-422.

[0099] In embodiments, the NBP comprises one or more RNA binding domains (RBDs) and one or more intrinsically disordered regions (IDRs). In embodiments, the IDR comprises an RG[G] repeat, an RS/RG rich domain, a K/R patch, molecular recognition features, a low complexity sequence, a pentatricopeptide domain, or a combination thereof.

[0100] In embodiments, the NBP comprises one or more of the following domains: a short linear motif (SLIM), an RG repeat, an RGG repeat, a RS/RG rich domain, a K/R basic patch, a molecular recognition feature, a low complexity sequence, an RNA recognition motif, a double-stranded RNA binding domain, a K homology domain, a zinc finger domain (e.g., CCHH ZF domain, a CCCC (Ran-BP2) domain, a CCCH ZF domain), an RGG domain, a Pumillo family domain, a pentatricopeptide domain, a cold shock domain, a helicase domain, a La motif, a Piwi-Argonaute-Zwille (PAZ) domain, a P-element induced wimpy testis, a pseudouridine synthase and archaeosine transglycosylate (PUA), a Pumillo-like repeat (PUM), a ribosomal S1-like (S1), Sm and Like-Sm (Sm/Lsm) repeat, thiouridine synthases and RNA methylases and pseudouridine synthases (THUMP), and a domain with YT521-B homology. The following references describe many of these domains and are incorporated by reference herein in their entireties: Balcerak et al. Open Biol. 2019 June; 9(6) 190096; Jarvelin et al. Cell Commun Signal, 2016: 14, 9; Corley et al. Mol. Cell. 2020 Apr. 2; 78(1): 9-29; De Franco et al. Sci Rep: 2019: 9, 2484; Shotwell et al. 2020. Wiley Interdiscip Rev RNA, 11, e1573; Simon et al. 2019. Molecular Cell, 75, 66-75.e5; Varadi et al, 2015, PLOS One, 10, e0139731; Zeke et al, 2020, WIREs RNA, n/a, e1714.

[0101] In embodiments, the NBP comprises a short linear motif (SLIM). A SLIM is composed of up to ten amino acid residue motifs located predominantly outside protein domains. SLIMs bind to RNA with low affinity in a non-specific manner. SLIMs are often repeated multiple times throughout a protein.

[0102] In embodiments, the NBP comprises an RS/RG rich domain. RS/RG rich domains contain repeats of arginine-serine (RS), arginine-glycine (RG), or a combination thereof. RS/RG rich domains mediate specific or non-specific interactions with RNA. Examples of proteins containing RS/RG rich domains include the SR proteins and SR-like proteins like serine/arginine-rich splicing factor 1 (SRSF1) and RNA-helicase DDX23.

[0103] In embodiments, the NBP comprises a RG[G] repeat. RG[G] repeats are known to have broad, degenerate binding. RG[G] repeats are motifs rich in arginine and glycine consisting of at least three RG/RGG repeats (e.g., from 3-500), separated by 10 amino acid residues. RG/RGG motifs include RGG and/or RG repeats of varied lengths interspersed with spacers of different amino acids. In embodiments, an NBP comprises a di-RGG motif. Di-RGG motifs contain two repeated RGG sequences separated by 0-4 amino acids. In embodiments, an NBP comprises a di-RG motif. Di-RG motifs contain two repeated RG sequences separated by 0-4 amino acids. In embodiments, an NBP comprises a tri-RGG motif. Tri-RGG motifs contain three repeated RGG sequences separated by 0-4 amino acids. In embodiments, an NBP comprises a tri-RG motif. Tri-RG motifs contain three repeated RG sequences separated by 0-4 amino acids. These motifs are described in the following article which is incorporated by reference herein in its entirety: Thandapani et al. (2013). Molecular Cell, 50, 613-623.

[0104] In embodiments, the amino acid sequence of the NBP comprises one or more RG, RGG, RGGR, RGGGR, or a combination thereof. In embodiments, NBPs comprising RG, RGG, RGGR, or RGGGR or a combination thereof mediate hydrogen bonding and base stacking with DNA and RNA via the arginine moieties. In embodiments, NBPs comprising RG, RGG, RGGR, RGGGR or a combination thereof bind to DNA G-quadruplexes. An exemplary protein containing a repeat of RGG, RGGR, or RGGGR is the RNA binding protein FUS. In embodiments, the NBP comprises FUS. In embodiments, the NBP sequence contains consecutive repeats of RGG, RGGR, RGGGR, or combinations thereof. An exemplary NBP containing a combination of RGG, RGGR, or RGGGR repeats may comprise the sequence RGGRGGRGGRRGGRRGGRRGGGRRGG. In embodiments, an NBP may comprise one or more RGG, RGGR, or RGGGR interspersed throughout its sequence. In embodiments, an NBP contains from 1 to 100 RG, RGG, RGGR, or RGGGR sequences. The RGG, RGGR, and RGGGR may be interspersed throughout the sequence (separated by one or more amino acids) or consecutive. In embodiments, the NBP comprises about 1, about 2, about 3, about 4, about 5, about 6, about 7, about 8, about 9, about 10, about 11, about 12, about 13, about 14, about 15, about 16, about 17, about 18, about 19, about 20, about 21, about 22, about 23, about 24, about 25, about 26, about 27, about 28, about 29, about 30, about 31, about 32, about 33, about 34, about 35, about 36, about 37, about 38, about 39, about 40, about 41, about 42, about 43, about 44, about 45, about 46, about 47, about 48, about 49, about 50, about 51, about 52, about 53, about 54, about 55, about 56, about 57, about 58, about 59, about 60, about 61, about 62, about 63, about 64, about 65, about 66, about 67, about 68, about 69, about 70, about 71, about 72, about 73, about 74, about 75, about 76, about 77, about 78, about 79, about 80, about 81, about 82, about 83, about 84, about 85, about 86, about 87, about 88, about 89, about 90, about 91, about 92, about 93, about 94, about 95, about 96, about 97, about 98, about 99, or about 100 RG, RGG, RGGR, or RGGGR repeats. The RG, RGG, RGGR, and RGGGR repeats may be consecutive or interspersed throughout the sequence. The following article describes exemplary RGG sequences and is incorporated by reference herein in its entirety: Simon et al. Molecular Cell (2019), 75, 66-75.e5.

[0105] In embodiments, an NBP comprises an RG domain. An RG domain comprises from about 2 to about 500 repeats of RG (arginine-glycine). In embodiments, an NBP comprises an RGG domain. An RGG domain comprises from about 2 to about 500 repeats of RGG (arginine-glycine-glycine). In embodiments, an NBP comprises an RGGR domain. An RGGR domain comprises from about 2 to about 500 repeats of RGGR (arginine-glycine-glycine-arginine). In embodiments, an NBP comprises an RGGGR domain. An RGGGR domain comprises from about 2 to about 500 repeats of RGG (arginine-glycine-glycine-glycine-arginine). In embodiments, an NBP comprise an RG mix domain. An RG mix domain comprises 2-500 simultaneous repeats of RG, RGG, RGGR, and/or RGGGR. For example, the RG mix domain may comprise RGG, followed by RG, followed by RGGR, followed by RG, followed by RGGGR.

[0106] In embodiments, the NBP comprises a K/R basic patch. A K/R basic patch contains from 4-8 consecutive lysines, arginines, or a combination thereof. K/R basic patches form a highly positive and exposed interface which binds to RNA. K/R basic patches are frequently contained in multiple clusters on the same protein.

[0107] In embodiments, the NBP comprises a molecular recognition feature (MoRF). In embodiments, the MoRF is up to 25 amino acids long, 50 or more amino acids long, or from 25 to 50 amino acids in length. MoRFs undergo a dynamic disorder-to-order transition upon ligand binding.

[0108] In embodiments, the NBP comprises a low complexity (LC) sequence. In embodiments, LC sequences contain up to 100 amino acids and are composed of many repeats of the same amino acid or several amino acid. LC sequences can polymeraize into amyloid-like fibers and undergo reversible phase transition to a hydrogel-like state. Examples of proteins containing LC sequences are FUS and hnRNPA2.

[0109] In embodiments, the NBP comprises a RNA recognition motif (RRM). RRMs bind to RNA. Typically, binding is sequence-specific. In embodiments, RRMs comprise from about 75 to about 125 amino acids, for example, about 75, about 80, about 85, about 90, about 95, about 100, about 105, about 110, about 115, about 120, or about 125 amino acids in length. In embodiments, an RRM comprises about 85 amino acids. RRMs typically adopt a β₁α₁β₂β₃α₂β₄ topology forming two alpha-helices against an antiparallel beta sheet, which houses the conserved RNA-binding RNP1 and RNP2 motifs in central β₁ and β₃ strands.

[0110] In embodiments, the NBP comprises a double stranded RNA-binding domain (dsRBD). In embodiments, a dsRBD comprises from about 55 to about 80 amino acids, or from about 65 to about 70 amino acids. In embodiments, a dsRBD comprises 68 amino acids. dsRBD typically adopt an αβββα conformation. In embodiments, a dsRBD occurs as a tandem repeats or in combination with other RNA binding domains. There are two subclasses of dsRBDs, type B and type A. Type A has better binding to dsRNA than type B. dsRBDs typically bind in a shape dependent fashion and not sequence specific. However, ADAR2 is a rare example of a dsRBD that exhibits sequence specific binding.

[0111] In embodiments, the NBP comprises a K homology domain. In embodiments, the K homology domain comprises from 60 to 80 amino acids. In embodiments, the K homology domain comprises 70 amino acids. There are two types of K homology domains: type I or reverse type II. The type I K homology domain adopts the β₁α₁α₂β₂β′α′topology. The reverse type II K homology domain adopts the α′β′β₁α₁α₂β₂ topology. K homology domains do not use aromatic amino acids for binding and instead use hydrogen bonding. NBP containing K homology domain are difficult to design due to their stringent sequence specificity.

[0112] In embodiments, the NBP comprises one or more zinc finger (ZF) domains. In embodiments, the NBP comprises from 1-100 ZF domains, for example, about 1, about 2, about 3, about 4, about 5, about 6, about 7, about 8, about 9, about 10, about 11, about 12, about 13, about 14, about 15, about 16, about 17, about 18, about 19, about 20, about 21, about 22, about 23, about 24, about 25, about 26, about 27, about 28, about 29, about 30, about 31, about 32, about 33, about 34, about 35, about 36, about 37, about 38, about 39, about 40, about 41, about 42, about 43, about 44, about 45, about 46, about 47, about 48, about 49, about 50, about 51, about 52, about 53, about 54, about 55, about 56, about 57, about 58, about 59, about 60, about 61, about 62, about 63, about 64, about 65, about 66, about 67, about 68, about 69, about 70, about 71, about 72, about 73, about 74, about 75, about 76, about 77, about 78, about 79, about 80, about 81, about 82, about 83, about 84, about 85, about 86, about 87, about 88, about 89, about 90, about 91, about 92, about 93, about 94, about 95, about 96, about 97, about 98, about 99, or about 100 ZF domains. In embodiments, the zinc finger domain is selected from one of the following subtypes: CCHC (zinc knuckle), CCCH, CCCC (RanBP2), and CCHH. C and H refer to the interspersed cysteine and histidine residues that coordinate the zinc atom. In embodiments, a zinc finger domain comprises from about 20 to about 40 amino acids, for example, about 20, about 22, about 24, about 26, about 28, about 30, about 32, about 34, about 36, about 38, or about 40 amino acids. CCHH ZF domains contain two conserved cysteine and two conserved histidine residues. CCHH ZF domains recognize both structural and sequence specific elements. To this date, there are no engineered versions of CCHH ZF domains. CCHH ZF domains bind both single stranded and double stranded DNA and RNA. CCCC ZFs might not require a specific RNA conformation for binding. Typically, CCCC ZFs recognize short three nucleotide repeats. An engineered version of the CCCC ZF is described in the following reference which is incorporated by reference herein in its entirety: De Franco et al. Sci Rep: 2019: 9, 2484.

[0113] In embodiment, the NBP comprises a pentatricopeptide repeat (PPR). PPR contain from 20-50 amino acids, for example, about 20, about 21, about 22, about 23, about 24, about 25, about 26, about 27, about 28, about 29, about 30, about 31, about 32, about 33, about 34, about 35, about 36, about 37, about 38, about 39, about 40, about 41, about 42, about 43, about 44, about 45, about 46, about 47, about 48, about 49, or about 50 amino acids. In embodiments, a PPR comprises about 35 amino acids. In embodiments, an NBP comprises a PPR that repeats from about 2-30 times within the NBP sequence. In embodiments, an NBP comprises a PPR that repeats from about 10-30 times within the NBP sequence. In embodiments, the PPR may repeat about 2, about 3, about 4, about 5, about 6, about 7, about 8, about 9, about 10, about 11, about 12, about 13, about 14, about 15, about 16, about 17, about 18, about 19, about 20, about 21, about 22, about 23, about 24, about 25, about 26, about 27, about 28, about 29, or about 30 times within the NBP. In embodiments, the PPR repeats at least 10 times. PPR repeats may be consecutive or separated by one or more amino acids. PPR repeats form two antiparallel α-helices. In embodiments, NBPs comprising a PPR form a solenoid structure. In embodiments, NBPs comprising a PPR bind to single stranded RNA, single stranded DNA., or mRNA. In embodiments, NBPs comprising a PPR bind to the 5′ cap of mRNA. In embodiments, NBPs comprising a PPR bind to the 3′ poly A tail of mRNA.

[0114] In embodiments, an NBP comprises a Pumilio homology domain (also referred to as Pumillo-like repeat, abbreviated “PUF”). PUF domains contain eight α-helical repeats of a conserved 36 amino acid sequence that forms a concave RNA binding surface. In embodiments, an NBP comprises from 1-8 of the α-helical repeats of a PUF domain, for example, 1, 2, 3, 4, 5, 6, 7, or 8 α-helical repeats. In embodiments, an NBP comprising a PUF binds to a poly A tail. In embodiments, an NBP comprising a PUF binds to mRNA. The following paper describes PUF domains and is incorporated by reference herein in its entirety: Zhao et al. Nucleic Acids Res. 2018 May 18; 46(9): 4771-4782. In embodiments, an NBP comprising a PUF domain binds to the 3′ untranslated region of mRNA.

[0115] In embodiments, an NBP comprises a cold shock domain (CSD). CSD contain five antiparallel β-strands that form a β-barrel structure known as an oligosaccharide-/oligonucleotide binding fold. CSD bind to single stranded RNA and single stranded DNA. In embodiments, CSD are comprised of from 60 to 80 amino acids, for example, about 60, about 61, about 62, about 63, about 64, about 65, about 66, about 67, about 68, about 69, about 70, about 71, about 72, about 73, about 74, about 75, about 76, about 77, about 78, about 79, or about 80 amino acids. In embodiments, CSD contain about 70 amino acids. In embodiments, the CSD is a bacterial CSD. In embodiments, bacterial CSD prefer ssDNA to ssRNA by up to ten-fold.

[0116] In embodiments, an NBP comprises a helicase domain. Helicases comprise six superfamilies (SFs), including SF1, SF2, SF3, SF4, SF5, and SF6. In embodiments, the helicase domain is a eukaryotic RNA and DNA helicase from the SF1 or SF2 superfamilies. Non-limiting examples of families within the SF1 and SF2 superfamilies include the Upf1-like family, the DEAD-box, DEAH, RIG-I-like, Ski2-like, and NS3 families. In embodiments, the helicase domain is a bacterial or viral helicase from the SF3, SF4, SF5, or SF6 superfamily. ATP binding to a helicase promotes higher affinity of a helicase domain to RNA. ATP hydrolysis promotes conformational changes that cause the helicase to unwind its substrate and/or translocate one nucleotide.

[0117] In embodiments, a NBP comprises a La motif. The La motif consists of five α-helices and three β-strands that form a small antiparallel β-sheet against a modified “winged-helix” fold. In embodiments, the La motif binds to 3′-terminal UUU-OH elements on polymerase III transcribed small RNAs. La motifs comprise between 80 and 100 amino acids, for example, about 80, about 81, about 82, about 83, about 84, about 85, about 86, about 87, about 88, about 89, about 90, about 91, about 92, about 93, about 94, about 95, about 96, about 97, about 98, about 99, or about 100 amino acids. In embodiments, a La motif comprises about 90 amino acids.

[0118] In embodiments, a NBP comprises a Piwi-Argonautre-Zwille (PAZ) domain. In embodiments, a PAZ domain facilitates binding of small interfering mRNA and/or microRNA guides to mRNA targets. In embodiments, the PAZ domain is from a Dicer protein or an Argonaute protein. PAZ domains display a six-stranded β-barrel topped with two α-helices and flanked on the opposite side by a special appendage containing a β-hairpin and short α-helix.

[0119] In embodiments, a NBP comprises a P-element induced Wimpy Testis (PIWI) domain. In embodiments, a PIWI domain facilitates binding of small interfering mRNA and/or microRNA guides to mRNA targets. In embodiments, a PIWI domain is found on an Argonaute protein. The PIWI domain tertiary structure forms an RNase H-like fold consisting of a five-stranded β-sheet flanked by α-helices on both faces.

[0120] In embodiments, a NBP comprises a PAZ domain and a PIWI domain.

[0121] In embodiments, a NBP comprises a pseudouridine synthase and archaeosine transglycosylase (PUA) domain. PUA domains range from 67-94 amino acids in length, with a β₁α₁β₂β₃β₄β₅α₂β₆ architecture that forms a pseudobarrel encased by two α-helices. In embodiments, an NBP comprising a PUA binds to double stranded RNA.

[0122] In embodiments, a NBP comprises a S1 RNA binding domain. In embodiments, an NBP comprising a S1 RNA binding domain interacts with single stranded RNA, double stranded RNA, or mRNA. In embodiments, the S1 RNA binding domain comprises from about 60 to about 80 amino acids, for example, about 60, about 61, about 62, about 63, about 64, about 65, about 66, about 67, about 68, about 69, about 70, about 71, about 72, about 73, about 74, about 75, about 76, about 77, about 78, about 79, or about 80 amino acids. In embodiments, the S1 RNA binding domain comprises about 70 amino acids.

[0123] In embodiments, a NBP comprises an Sm RNA binding motif. Sm RNA binding motifs are found in Sm and Like-sm (Lsm) proteins in eukaryotes and archaea and in Hfq proteins in prokaryotes. The Sm motif consists of ˜70 residues with an α₁β₁β₂β₃β₄β₅ topology that forms a curved antiparallel β-sheet. Sm-containing proteins readily multimerize through interactions between strands β₄ and β₅ in two Sm motifs. In embodiments, a NBP comprises 1, 2, 3, 4, 5, 6, 7, 8, 9, or 10 Sm motifs. In embodiments, an NBP comprises two Sm motifs. In embodiments, an Sm binding motif binds to RNA through hydrogen bonding and base stacking interactions.

[0124] In embodiments, a NBP comprises a thiouridine synthase and RNA methylase and pseudouridine synthase (THUMP) domain. The THUMP domain is found in many tRNA-modifying enzymes. THUMP domains are found in proximity to RNA-modifying domains and sometimes in proximity to an N-terminal ferredoxin-like domain. THUMP domains display a α₁α₂β₁α₃β₂β₂ topology that forms parallel α-helices flanking a β-sheet. In embodiments, an NBP comprising a THUMP domain binds to tRNA.

[0125] In embodiments, a NBP comprises YT521-B homology domain. In embodiments, a YT521-B homology domains comprises from 100-150 amino acids, for example, about 100, about 101, about 102, about 103, about 104, about 105, about 106, about 107, about 108, about 109, about 110, about 111, about 112, about 113, about 114, about 115, about 116, about 117, about 118, about 119, about 120, about 121, about 122, about 123, about 124, about 125, about 126, about 127, about 128, about 129, about 130, about 131, about 132, about 133, about 134, about 135, about 136, about 137, about 138, about 139, about 140, about 141, about 142, about 143, about 144, about 145, about 146, about 147, about 148, about 149, or about 150 amino acids. In embodiments, a NBP comprising a YT521-B homology domain binds to a methylated adenosine.

[0126] In some embodiments, the first polypeptide is selected from cluster of differentiation 4 (CD4), the Z-domain of Staphylococcus protein A (SpA Z-domain), low-density lipoprotein receptor (LDLR), albumin binding polypeptide (ABD), coxsackievirus and adenovirus receptor (CAR), fibronectin type III (FN3), poly(A) binding protein (PABP), Z-DNA binding protein 1 (ZBP1), or a fragment or derivative thereof.

[0127] In some embodiments, the first polypeptide of the fusion protein comprises cluster of differentiation 4 (CD4), or a fragment or derivative thereof. CD4 binds to lentivirus particles, retrovirus particles, and glycoprotein 120 (gp120) of human immunodeficiency virus.

[0128] CD4 (see, e.g., Uniprot Accession No. P01730) is a glycoprotein found on the surface of immune cells such as T helper cells, monocytes, macrophages, and dendritic cells. The amino acid sequence of CD4 from Homo sapiens is (M)NRGVPFRHLLLVLQLALLPAATQGKKVVLGKKGDTVELTCTASQKKSIQFHWKNSN QIKILGNQGSFLTKGPSKLNDRADSRRSLWDQGNFPLIIKNLKIEDSDTYICEVEDQKEEV QLLVFGLTANSDTHLLQGQSLTLTLESPPGSSPSVQCRSPRGKNIQGGKTLSVSQLELQD SGTWTCTVLQNQKKVEFKIDIVVLAFQKASSIVYKKEGEQVEFSFPLAFTVEKLTGSGEL WWQAERASSSKSWITFDLKNKEVSVKRVTQDPKLQMGKKLPLHLTLPQALPQYAGSG NLTLALEAKTGKLHQEVNLVVMRATQLQKNLTCEVWGPTSPKLMLSLKLENKEAKVS KREKAVWVLNPEAGMWQCLLSDSGQVLLESNIKVLPTWSTPVQPMALIVLGGVAGLLL FIGLGIFFCVRCRHRRRQAERMSQIKRLLSEKKTCQCPHRFQKTCSPI (SEQ ID NO: 78).

[0129] In some embodiments, the first polypeptide comprises CD4 having an amino acid sequence of SEQ ID NO: 78 and at least one, at least two, at least three, or at least four mutations of amino acids 112, 113, 116, and 117 to glycine, alanine, lysine, arginine, and histidine.

[0130] In some embodiments, the first polypeptide comprises the extracellular domain of CD4. In some embodiments, the first polypeptide comprises the extracellular domain of CD4 having an amino acid sequence of SEQ ID NO: 79.

[0131] In some embodiments, the first polypeptide comprises a fragment of the extracellular domain of CD4 having an amino acid sequence of SEQ ID NO: 80. In some embodiments, the first polypeptide comprises domain 1 of CD4 having an amino acid sequence of SEQ ID NO: 81. In some embodiments, the first polypeptide comprises the extracellular domain of CD4 or a fragment or derivative thereof (SEQ ID NOs: 79-81) having at least one, at least two, at least three, or at least four mutations at amino acids 88, 89, 92, and 93 to glycine, alanine, lysine, arginine, or histidine.

[0132] In some embodiments, the first polypeptide comprising CD4, or a fragment or derivative thereof, comprises an amino acid sequence selected from any one of SEQ ID NOs: 78-81. In some embodiments, the first polypeptide comprising CD4, or a fragment or derivative thereof, comprises the amino acid sequence of any one of SEQ ID NOs: 78-81 with at least 1, at least 2, at least 3, at least 4, at least 5, at least 6, at least 7, at least 8, at least 9, at least 10, at least 11, at least 12, at least 13, at least 14, at least 15, at least 16, at least 17, at least 18, at least 19, at least 20, at least 21, at least 22, at least 23, at least 24, at least 25 or more amino acid mutations. In some embodiments, the first polypeptide comprising CD4, or fragment thereof, comprises a sequence with at least 90%, at least 95%, at least 97%, or at least 99% identity to any one of SEQ ID Nos: 78-81.

[0133] In some embodiments, the first polypeptide comprises protein A, or a derivative or fragment thereof. Protein A (see, e.g., Uniprot Accession No. Q70AB8), binds to the Fc region of most immunoglobulins. In some embodiments, protein A is Staphylococcal protein A. The amino acid sequence of Protein A is:

(SEQ ID NO: 136)
(M)AAQHDEAQQNAFYQVLNMPNLNADQRNGFIQSLKDDPSQSAN
VLGEAKKLNESQAPKADNNFNKEQQNAFYEILNMPNLNEEQRNGF
IQSLKDDPSQSANLLSEAKKLNESQAPKADNKFNKEQQNAFYEIL
HLPNLNEEQRNGFIQSLKDDPSQSANLLAEAKKLNDAQAPKADNK
FNKEQQNAFYEILHLPNLTEEQRNGFIQSLKDDPSVSKEILAEAK
KLNDAQAPKEEDNNKPGKEDGNKPGKEDGN.

[0134] In some embodiments, the first polypeptide comprises Protein A having an amino acid sequence of SEQ ID NO: 136 with a mutation of A117G. In some embodiments, the first polypeptide comprises the B domain of Protein A or a fragment or derivative thereof, having the amino acid sequence of SEQ ID NO: 137. In some embodiments, the first polypeptide comprises the B domain of Protein A or a fragment or derivative thereof, having the amino acid sequence of SEQ ID NO: 137 with an amino acid mutation of A2G. In some embodiments, the first polypeptide comprises the C domain of Protein A or a fragment or derivative thereof, having the amino acid sequence of SEQ ID NO: 138. In some embodiments, the first polypeptide comprises the Z domain of Protein A, or a fragment or derivative thereof, having the amino acid sequence of SEQ ID NO:

[0135] In some embodiments, the first polypeptide comprising Protein G, or a fragment or derivative thereof, comprises the amino acid sequence of SEQ ID NOs: 136-138 with at least 1, at least 2, at least 3, at least 4, at least 5, at least 6, at least 7, at least 8, at least 9, at least 10, at least 11, at least 12, at least 13, at least 14, at least 15, at least 16, at least 17, at least 18, at least 19, at least 20, at least 21, at least 22, at least 23, at least 24, at least 25 or more amino acid mutations. In some embodiments, the first polypeptide comprising an albumin binding polypeptide, or fragment or derivative thereof, comprises a sequence with at least 90%, at least 95%, at least 97%, or at least 99% identity to any one of SEQ ID NOs: 136-138.

[0136] In some embodiments, the first polypeptide comprises protein G, or a derivative or fragment thereof. Protein G (see, e.g., Uniprot Accession No. P19909), binds to the Fc region of most immunoglobulins. The amino acid sequence of Protein G is:

(SEQ ID NO: 154)
(M)EKEKKVKYFLRKSAFGLASVSAAFLVGSTVFAVDSPIEDTPI
IRNGGELTNLLGNSETTLALRNEESATADLTAAAVADTVAAAAAE
NAGAAAWEAAAAADALAKAKADALKEFNKYGVSDYYKNLINNAKT
VEGVKDLQAQVVESAKKARISEATDGLSDFLKSQTPAEDTVKSIE
LAEAKVLANRELDKYGVSDYHKNLINNAKTVEGVKDLQAQVVESA
KKARISEATDGLSDFLKSQTPAEDTVKSIELAEAKVLANRELDKY
GVSDYYKNLINNAKTVEGVKALIDEILAALPKTDTYKLILNGKTL
KGETTTEAVDAATAEKVFKQYANDNGVDGEWTYDDATKTFTVTEK
PEVIDASELTPAVTTYKLVINGKTLKGETTTEAVDAATAEKVFKQ
YANDNGVDGEWTYDDATKTFTVTEKPEVIDASELTPAVTTYKLVI
NGKTLKGETTTKAVDAETAEKAFKQYANDNGVDGVWTYDDATKTF
TVTEMVTEVPGDAPTEPEKPEASIPLVPLTPATPIAKDDAKKDD
TKKEDAKKPEAKKEDAKKAETLPTTGEGSNPFFTAAALAVMAGAG
ALAVASKRKED.

[0137] In some embodiments, the first polypeptide comprises the G domain of Protein G or a fragment or derivative thereof, having the amino acid sequence of SEQ ID NO: 155. In some embodiments, the first polypeptide comprises a fragment of Protein G, having the amino acid sequence of SEQ ID NO: 156.

[0138] In some embodiments, the first polypeptide comprising Protein G, or a fragment or derivative thereof, comprises the amino acid sequence of SEQ ID NOs: 154-156 with at least 1, at least 2, at least 3, at least 4, at least 5, at least 6, at least 7, at least 8, at least 9, at least 10, at least 11, at least 12, at least 13, at least 14, at least 15, at least 16, at least 17, at least 18, at least 19, at least 20, at least 21, at least 22, at least 23, at least 24, at least 25 or more amino acid mutations. In some embodiments, the first polypeptide comprising an albumin binding polypeptide, or fragment or derivative thereof, comprises a sequence with at least 90%, at least 95%, at least 97%, or at least 99% identity to any one of SEQ ID NOs: 154-156.

[0139] In some embodiments, the first polypeptide binds to a kappa light chain. In some embodiments, the kappa light chain is part of an antibody or antigen-binding portion of a monoclonal antibody thereof. In some embodiments, the first polypeptide comprises protein L. Protein L binds to antibodies or antibody binding fragments thereof through interactions with the kappa light chain. The amino acid sequence of Protein L is:

(SEQ ID NO: 139)
(M)KINKKLLMAALAGAIVVGGGANAYAAEEDNTDNNLSMDEISD
AYFDYHGDVSDSVDPVEEEIDEALAKALAEAKETAKKHIDSLNHL
SETAKKLAKNDIDSATTINAINDIVARADVMERKTAEKEEAEKLA
AAKETAKKHIDELKHLADKTKELAKRDIDSATTINAINDIVARAD
VMERKTAEKEEAEKLAAAKETAKKHIDELKHLADKTKELAKRDID
SATTIDAINDIVARADVMERKLSEKETPEPEEEVTIKANLIFADG
STQNAEFKGTFAKAVSDAYAYADALKKDNGEYTVDVADKGLTLNI
KFAGKKEKPEEPKEEVTIKVNLIFADGKTQTAEFKGTFEEATAKA
YAYADLLAKENGEYTADLEDGGNTINIKFAGKETPETPEEPKEEV
TIKVNLIFADGKIQTAEFKGTFEEATAKAYAYANLLAKENGEYTA
DLEDGGNTINIKFAGKETPETPEEPKEEVTIKVNLIFADGKTQTA
EFKGTFEEATAEAYRYADLLAKVNGEYTADLEDGGYTINIKFAGK
EQPGENPGITIDEWLLKNAKEEAIKELKEAGITSDLYFSLINKAK
TVEGVEALKNEILKAHAGEETPELKDGYATYEEAEAAAKEALKND
DVNNAYEIVQGADGRYYYVLKIEVADEEEPGEDTPEVQEGYATYE
EAEAAAKEALKEDKVNNAYEVVQGADGRYYYVLKIEDKEDEQPGE
EPGENPGITIDEWLLKNAKEDAIKELKEAGISSDIYFDAINKAKT
VEGVEALKNEILKAHAEKPGENPGITIDEWLLKNAKEAAIKELKE
AGITAEYLFNLINKAKTVEGVESLKNEILKAHAEKPGENPGITID
EWLLKNAKEDAIKELKEAGITSDIYFDAINKAKTIEGVEALKNEI
LKAHKKDEEPGKKPGEDKKPEDKKPGEDKKPEDKKPGEDKKPEDK
KPGKTDKDSPNKKKKAKLPKAGSEAEILTLAAAALSTAAGAYVSL
KKRK.

[0140] In some embodiments, the first polypeptide comprises a fragment of Protein L having an amino acid sequence of SEQ ID NO: 140.

[0141] In some embodiments, the first polypeptide comprising Protein L, or a fragment or derivative thereof, comprises the amino acid sequence of SEQ ID NOs: 139-140 with at least 1, at least 2, at least 3, at least 4, at least 5, at least 6, at least 7, at least 8, at least 9, at least 10, at least 11, at least 12, at least 13, at least 14, at least 15, at least 16, at least 17, at least 18, at least 19, at least 20, at least 21, at least 22, at least 23, at least 24, at least 25 or more amino acid mutations. In some embodiments, the first polypeptide comprising an albumin binding polypeptide, or fragment or derivative thereof, comprises a sequence with at least 90%, at least 95%, at least 97%, or at least 99% identity to any one of SEQ ID NOs: 139-140.

[0142] In some embodiments, a first polypeptide of a purification matrix provided herein comprises the LDLR, or a fragment or derivative thereof. The low-density lipoprotein receptor LDLR (see, e.g., Uniprot Accession No. P01130) is a cell-surface receptor that mediates the endocytosis of cholesterol rich low-density lipoproteins. The amino acid sequence of LDLR from Homo sapiens is (M)GPWGWKLRWTVALLLAAAGTAVGDRCERNEFQCQDGKCISYKWVCDGSAECQDG SDESQETCLSVTCKSGDFSCGGRVNRCIPQFWRCDGQVDCDNGSDEQGCPPKTCSQDEF RCHDGKCISRQFVCDSDRDCLDGSDEASCPVLTCGPASFQCNSSTCIPQLWACDNDPDC EDGSDEWPQRCRGLYVFQGDSSPCSAFEFHCLSGECIHSSWRCDGGPDCKDKSDEENCA VATCRPDEFQCSDGNCIHGSRQCDREYDCKDMSDEVGCVNVTLCEGPNKFKCHSGECI TLDKVCNMARDCRDWSDEPIKECGTNECLDNNGGCSHVCNDLKIGYECLCPDGFQLVA QRRCEDIDECQDPDTCSQLCVNLEGGYKCQCEEGFQLDPHTKACKAVGSIAYLFFTNRH EVRKMTLDRSEYTSLIPNLRNVVALDTEVASNRIYWSDLSQRMICSTQLDRAHGVSSYD TVISRDIQAPDGLAVDWIHSNIYWTDSVLGTVSVADTKGVKRKTLFRENGSKPRAIVVD PVHGFMYWTDWGTPAKIKKGGLNGVDIYSLVTENIQWPNGITLDLLSGRLYWVDSKLH SISSIDVNGGNRKTILEDEKRLAHPFSLAVFEDK VFWTDIINEAIFSANRLTGSDVNLLAE NLLSPEDMVLFHNLTQPRGVNWCERTTLSNGGCQYLCLPAPQINPHSPKFTCACPDGML LARDMRSCLTEAEAAVATQETSTVRLKVSSTAVRTQHTTTRPVPDTSRLPGATPGLTTV EIVTMSHQALGDVAGRGNEKKPSSVRALSIVLPIVLLVFLCLGVFLLWKNWRLKNINSIN FDNPVYQKTTEDEVHICHNQDGYSYPSRQMVSLEDDVA (SEQ ID NO: 126).

[0143] In some embodiments, the first polypeptide comprises the extracellular domain of LDLR having an amino acid sequence of SEQ ID NO: 127. In some embodiments, the first polypeptide comprises a fragment of the extracellular domain of LDLR having an amino acid sequence of SEQ ID NO: 130. In some embodiments, the first polypeptide comprises the CR2 domain of LDLR having an amino acid sequence of SEQ ID NO: 128. In some embodiments, the first polypeptide comprises the CR3 domain of LDLR having an amino acid sequence of SEQ ID NO: 129.

[0144] In some embodiments, the first polypeptide comprising LDLR, or a fragment or derivative thereof, comprises an amino acid sequence selected from any one of SEQ ID NOs: 126-129. In some embodiments, the first polypeptide comprising LDLR, or a fragment or derivative thereof, comprises the amino acid sequence of any one of SEQ ID NOs: 126-129 with at least 1, at least 2, at least 3, at least 4, at least 5, at least 6, at least 7, at least 8, at least 9, at least 10, at least 11, at least 12, at least 13, at least 14, at least 15, at least 16, at least 17, at least 18, at least 19, at least 20, at least 21, at least 22, at least 23, at least 24, at least 25 or more amino acid mutations. In some embodiments, the first polypeptide comprising LDLR, or fragment thereof, comprises a sequence with at least 90%, at least 95%, at least 97%, or at least 99% identity to any one of SEQ ID Nos: 126-129.

[0145] In some embodiments, the first polypeptide binds an albumin, or derivative or fusion thereof. In some embodiments, the albumin is human serum albumin (HSA), bovine serum albumin (BSA), or ovalbumin. In some embodiments, the first polypeptide that binds an albumin comprises albumin-binding polypeptide (ABP), or a fragment or derivative thereof. In some embodiments, the albumin-binding polypeptide comprises an amino acid sequence of SEQ ID NO: 135. In some embodiments, the first polypeptide comprising an albumin-binding polypeptide, or fragment or derivative thereof, comprises the amino acid sequence of SEQ ID NO: 135 with at least 1, at least 2, at least 3, at least 4, at least 5, at least 6, at least 7, at least 8, at least 9, at least 10, at least 11, at least 12, at least 13, at least 14, at least 15, at least 16, at least 17, at least 18, at least 19, at least 20, at least 21, at least 22, at least 23, at least 24, at least 25 or more amino acid mutations. In some embodiments, the first polypeptide comprising an albumin-binding polypeptide, or fragment or derivative thereof, comprises a sequence with at least 90%, at least 95%, at least 97%, or at least 99% identity to SEQ ID NO: 135.

[0146] In some embodiments, the first polypeptide is a coxsackievirus and adenovirus receptor (CAR), or fragment or derivative thereof. The coxsackievirus and adenovirus receptor (see, e.g., Uniprot Accession No. P78310), which is expressed on heart, brain epithelial, and endothelial cells, binds to the fiber protein of the adenovirus capsid. The amino acid sequence of the coxsackievirus and adenovirus receptor from Homo sapiens is:

(SEQ ID NO: 117)
(M)ALLLCFVLLCGVVDFARSLSITTPEEMIEKAKGETAYLPCKF
TLSPEDQGPLDIEWLISPADNQKVDQVIILYSGDKIYDDYYPDLK
GRVHFTSNDLKSGDASINVTNLQLSDIGTYQCKVKKAPGVANKK
IHLVVLVKPSGARCYVDGSEEIGSDFKIKCEPKEGSLPLQYEWQ
KLSDSQKMPTSWLAEMTSSVISVKNASSEYSGTYSCTVRNRVGSD
QCLLRLNVVPPSNKAGLIAGAIIGTLLALALIGLIIFCCRKKRRE
EKYEKEVHHDIREDVPPPKSRTSTARSYIGSNHSSLGSMSPSNME
GYSKTQYNQVPSEDFERTPQSPTLPPAKVAAPNLSRMGAIPVMIP
AQSKDGSIV.

[0147] In some embodiments, a first polypeptide of a purification matrix provided herein comprises the coxsackievirus and adenovirus receptor, or a fragment or derivative thereof.

[0148] In some embodiments, the first polypeptide comprising a coxsackievirus and adenovirus receptor, or fragment thereof, comprises an amino acid sequence selected from any one of SEQ ID NOs: 117-125, 24 and 25. In some embodiments, the first polypeptide comprising a coxsackievirus and adenovirus receptor, or fragment thereof, comprises the amino acid sequence of any one of SEQ ID NOs: 117-125, 24 and 25 with at least 1, at least 2, at least 3, at least 4, at least 5, at least 6, at least 7, at least 8, at least 9, at least 10, at least 11, at least 12, at least 13, at least 14, at least 15, at least 16, at least 17, at least 18, at least 19, at least 20, at least 21, at least 22, at least 23, at least 24, at least 25 or more amino acid mutations. In some embodiments, the first polypeptide comprising a coxsackievirus and adenovirus receptor, or fragment thereof, comprises a sequence with at least 90%, at least 95%, at least 97%, or at least 99% identity to any one of SEQ ID NOs: 117-125, 24 and 25.

[0149] In some embodiments, the first polypeptide comprises the extracellular domain of the coxsackievirus and adenovirus receptor, or a fragment thereof. In some embodiments, the first polypeptide comprising the extracellular domain of the coxsackievirus and adenovirus receptor has an amino acid sequence of SEQ ID NO: 118 or 119. In some embodiments, the first polypeptide comprises domain 1 of the coxsackievirus and adenovirus receptor, or a fragment thereof. In some embodiments, the first polypeptide comprising domain 1 of the coxsackievirus and adenovirus receptor has an amino acid sequence of SEQ ID NO: 120. In some embodiments, the first polypeptide comprises domain 2 of the coxsackievirus and adenovirus receptor, or a fragment thereof. In some embodiments, the first polypeptide comprising domain 2 of the coxsackievirus and adenovirus receptor has an amino acid sequence of SEQ ID NO: 121. In some embodiments, the first polypeptide comprises isoform 3 of the coxsackievirus and adenovirus receptor, or a fragment thereof. In some embodiments, the first polypeptide comprising isoform 3 of the coxsackievirus and adenovirus receptor has an amino acid sequence of SEQ ID NO: 122. In some embodiments, the first polypeptide comprises isoform 4 of the coxsackievirus and adenovirus receptor, or a fragment thereof. In some embodiments, the first polypeptide comprising isoform 4 of the coxsackievirus and adenovirus receptor has an amino acid sequence of SEQ ID NO: 123. In some embodiments, the first polypeptide comprises isoform 5 of the coxsackievirus and adenovirus receptor, or a fragment thereof. In some embodiments, the first polypeptide comprising isoform 5 of the coxsackievirus and adenovirus receptor has an amino acid sequence of SEQ ID NO: 124. In some embodiments, the first polypeptide comprises isoform 7 of the coxsackievirus and adenovirus receptor, or a fragment thereof. In some embodiments, the first polypeptide comprising isoform 7 of the coxsackievirus and adenovirus receptor has an amino acid sequence of SEQ ID NO: 125.

[0150] In some embodiments, the first polypeptide comprises an amino acid sequence of M(RAIVFRVQWLRRYFVNGSRSGGG)ₙ, where n is an integer from 1 to 8 (SEQ ID NO: 24), for example, n is 1, 2, 3, 4, 5, 6, 7, or 8. In some embodiments, the first polypeptide comprises an amino acid sequence of (RAIVFRVQWLRRYFVNGSRSGGG)ₙ, wherein n is an integer from 1 to 8 (SEQ ID NO: 25), for example, 1, 2, 3, 4, 5, 6, 7, or 8.

[0151] In some embodiments, the first polypeptide comprises mRNA decay activator protein ZFP36L2 (Tis11d), or a fragment or derivative thereof. Tis11d G (see, e.g., Uniprot Accession No. P47974) binds to an adenosine and uridine rich element (ARE). The amino acid sequence of Tis11d is: (M)STTLLSAFYDVDFLCKTEKSLANLNLNNMLDKKAVGTPVAAAPSSGFAPGFLRRHS ASNLHALAHPAPSPGSCSPKFPGAANGSSCGSAAAGGPTSYGTLKEPSGGGGTALLNKE NKFRDRSFSENGDRSQHLLHLQQQQKGGGGSQINSTRYKTELCRPFEESGTCKYGEKCQ FAHGFHELRSLTRHPKYKTELCRTFHTIGFCPYGPRCHFIHNADERRPAPSGGASGDLRA FGTRDALHLGFPREPRPKLHHSLSFSGFPSGHHQPPGGLESPLLLDSPTSRTPPPPSCSSAS SCSSSASSCSSASAASTPSGAPTCCASAAAAAAAALLYGTGGAEDLLAPGAPCAACSSAS CANNAFAFGPELSSLITPLAIQTHNFAAVAAAAYYRSQQQQQQQGLAPPAQPPAPPSATL PAGAAAPPSPPFSFQLPRRLSDSPVFDAPPSPPDSLSDRDSYLSGSLSSGSLSGSESPSLDPG RRLPIFSRLSISDD (SEQ ID NO: 169). The methionine enclosed by parenthesis in the aforementioned sequence (M) or in any other sequences described herein is an initiator methionine. The presence of an initiator methionine is optional.

[0152] In some embodiments, the first polypeptide comprises a Tis11d fragment having an amino acid sequence of SEQ ID NO: 170. In some embodiments, the first polypeptide comprises the RNA binding domain of Tis11d having an amino acid sequence of SEQ ID NO: 171.

[0153] In some embodiments, the first polypeptide comprises Tis11d having an amino acid sequence of SEQ ID NO: 169 with at least one mutation selected from E195D, E195H, E195G, E195A, E195R, and E195K. In some embodiments, the first polypeptide comprises a Tis11d fragment having an amino acid sequence of SEQ ID NO: 170 with a mutation selected from at least one of E46D, E46H, E46G, E46A, E46R, and E46K. In some embodiments, the first polypeptide comprises the RNA binding domain of Tis11d having an amino acid sequence of SEQ ID NO: 171 with at least one mutation selected from E27D, E27H, E27G, E27A, E27R, and E27K.

[0154] In some embodiments, a first polypeptide comprising Tis11d, or a fragment or derivative thereof, comprises the amino acid sequence of SEQ ID NOs: 169-171 with at least 1, at least 2, at least 3, at least 4, at least 5, at least 6, at least 7, at least 8, at least 9, at least 10, at least 11, at least 12, at least 13, at least 14, at least 15, at least 16, at least 17, at least 18, at least 19, at least 20, at least 21, at least 22, at least 23, at least 24, at least 25 or more amino acid mutations. In some embodiments, the first polypeptide comprising Tis11d, or a fragment or derivative thereof, comprises a sequence with at least 90%, at least 95%, at least 97%, or at least 99% identity to any one of SEQ ID NOs: 169-171.

[0155] In some embodiments, the first polypeptide comprises eukaryotic translation initiation factor 4E (eIF4E), or a fragment or derivative thereof. eIF4E (see, e.g., Uniprot Accession No. P06730) binds to the mRNA cap. The amino acid sequence of eIF4E is:

(SEQ ID NO: 172)
(M)ATVEPETTPTPNPPTTEEEKTESNQEVANPEHYIKHPLQNRW
ALWFFKNDKSKTWQANLRLISKFDTVEDFWALYNHIQLSSNLMPG
CDYSLFKDGIEPMWEDEKNKRGGRWLITLNKQQRRSDLDRFWLET
LLCLIGESFDDYSDDVCGAVVNVRAKGDKIAIWTTECENREAVTH
IGRVYKERLGLPPKIVIGYQSHADTATKSGSTTKNRFVV.

[0156] In some embodiments, the first polypeptide comprises an eIF4E fragment having an amino acid sequence of SEQ ID NO: 173.

[0157] In some embodiments, a first polypeptide comprising eIF4E, or a fragment or derivative thereof, comprises the amino acid sequence of SEQ ID NOs: 172-173 with at least 1, at least 2, at least 3, at least 4, at least 5, at least 6, at least 7, at least 8, at least 9, at least 10, at least 11, at least 12, at least 13, at least 14, at least 15, at least 16, at least 17, at least 18, at least 19, at least 20, at least 21, at least 22, at least 23, at least 24, at least 25 or more amino acid mutations. In some embodiments, the first polypeptide comprising eIF4E, or fragment or derivative thereof, comprises a sequence with at least 90%, at least 95%, at least 97%, or at least 99% identity to any one of SEQ ID NOs: 172-173.

[0158] In some embodiments, the first polypeptide comprises poly(A)-binding protein (PABP), or a fragment or derivative thereof. PABP (see, e.g., Uniprot Accession No. P11940) binds to the poly(A) tail of mRNA. The amino acid sequence of PABP is:

(SEQ ID NO: 174)
(M)NPSAPSYPMASLYVGDLHPDVTEAMLYEKFSPAGPILSIRV
CRDMITRRSLGYAYVNFQQPADAERALDTMNFDVIKGKPVRIMWS
QRDPSLRKSGVGNIFIKNLDKSIDNKALYDTFSAFGNILSCKVVC
DENGSKGYGFVHFETQEAAERAIEKMNGMLLNDRKVFVGRFKSRK
EREAELGARAKEFTNVYIKNFGEDMDDERLKDLFGKFGPALSVKV
MTDESGKSKGFGFVSFERHEDAQKAVDEMNGKELNGKQIYVGRAQ
KKVERQTELKRKFEQMKQDRITRYQGVNLYVKNLDDGIDDERLRK
EFSPFGTITSAKVMMEGGRSKGFGFVCFSSPEEATKAVTEMNGRI
VATKPLYVALAQRKEERQAHLTNQYMQRMASVRAVPNPVINPYQP
APPSGYFMAAIPQTQNRAAYYPPSQIAQLRPSPRWTAQGARPHPF
QNMPGAIRPAAPRPPFSTMRPASSQVPRVMSTQRVANTSTQTMGP
RPAAAAAAATPAVRTVPQYKYAAGVRNPQQHLNAQPQVTMQQPAV
HVQGQEPLTASMLASAPPQEQKQMLGERLFPLIQAMHPTLAGKIT
GMLLEIDNSELLHMLESPESLRSKVDEAVAVLQAHQAKEAAQKAV
NSATGVPTV.

[0159] In some embodiments, the first polypeptide comprises a PABP fragment having an amino acid sequence of SEQ ID NO: 175. In some embodiments, the first polypeptide comprises the RNA recognition motif (RRM) 1 domain of PABP having an amino acid sequence of SEQ ID NO: 176. In some embodiments, the first polypeptide comprises the RRM2 domain of PABP having an amino acid sequence of SEQ ID NO: 177. In some embodiments, the first polypeptide comprises the RRM3 domain of PABP having an amino acid sequence of SEQ ID NO: 178. In some embodiments, the first polypeptide comprises the RRM4 domain of PABP having an amino acid sequence of SEQ ID NO: 179.

[0160] In some embodiments, a first polypeptide comprising PABP, or a fragment or derivative thereof, comprises the amino acid sequence of any one of SEQ ID NOs: 174-179 with at least 1, at least 2, at least 3, at least 4, at least 5, at least 6, at least 7, at least 8, at least 9, at least 10, at least 11, at least 12, at least 13, at least 14, at least 15, at least 16, at least 17, at least 18, at least 19, at least 20, at least 21, at least 22, at least 23, at least 24, at least 25 or more amino acid mutations. In some embodiments, the first polypeptide comprising PABP, or fragment or derivative thereof, comprises a sequence with at least 90%, at least 95%, at least 97%, or at least 99% identity to any one of SEQ ID NOs: 174-179.

[0161] In some embodiments, the first polypeptide comprises Z-DNA binding protein 1 (ZBP1), or a fragment or derivative thereof. ZBP1 (see, e.g., Uniprot Accession No. Q9H171) binds to double stranded DNA. The amino acid sequence of ZBP1 is:

(SEQ ID NO: 181)
MAQAPADPGREGHLEQRILQVLTEAGSPVKLAQLVKECQAPKREL
NQVLYRMKKELKVSLTSPATWCLGGTDPEGEGPAELALSSPAERP
QQHAATIPETPGPQFSQQREEDIYRFLKDNGPQRALVIAQALGMR
TAKDVNRDLYRMKSRHLLDMDEQSKAWTIYRPEDSGRRAKSASII
YQHNPINMICQNGPNSWISIANSEAIQIGHGNIITRQTVSREDGS
AGPRHLPSMAPGDSSTWGTLVDPWGPQDIHMEQSILRRVQLGHS
NEMRLHGVPSEGPAHIPPGSPPVSATAAGPEASFEARIPSPGTHP
EGEAAQRIHMKSCFLEDATIGNSNKMSISPGVAGPGGVAGSGEGE
PGEDAGRRPADTQSRSHFPRDIGQPITPSHSKLTPKLETMTLGNR
SHKAAEGSHYVDEASHEGSWWGGGI.

[0162] In some embodiments, the first polypeptide comprises Z-binding domain 1 of ZBP1 having an amino acid sequence of SEQ ID NO: 182. In some embodiments, the first polypeptide comprises Z-binding domain 2 of ZBP1 having an amino acid sequence of SEQ ID NO: 183.

[0163] In some embodiments, a first polypeptide comprising ZBP1, or a fragment or derivative thereof, comprises the amino acid sequence of any one of SEQ ID NOs: 181-183 with at least 1, at least 2, at least 3, at least 4, at least 5, at least 6, at least 7, at least 8, at least 9, at least 10, at least 11, at least 12, at least 13, at least 14, at least 15, at least 16, at least 17, at least 18, at least 19, at least 20, at least 21, at least 22, at least 23, at least 24, at least 25 or more amino acid mutations. In some embodiments, the first polypeptide comprising ZBP1, or fragment or derivative thereof, comprises a sequence with at least 90%, at least 95%, at least 97%, or at least 99% identity to any one of SEQ ID NOs: 181-183.

[0164] In some embodiments, the first polypeptide comprises PUM-HD domain-containing protein (PUM-HD), or a fragment or derivative thereof. PUM-HD (see, e.g., Uniprot Accession No. B2BXX4) binds to mRNA. The amino acid sequence of PUM-HD is:

(SEQ ID NO: 184)
(M)HRGNEDLSFGDDYEKEIGLLLGEQQRRQEEADEIEKELNLYR
SGSAPPTVDGSVNAAGGLFNGGGRGPFMEFGGGNKGNGFGGDDDE
LRKDPAYLSYYYANMKLNPRLPPPLMSREDLRVAQRLKGSSNVLG
GVGDRRNVNESRSLFSMPPGFDQMNEFEAEKTNASSSEWDANGLI
GLPGLGLGGKQKSFADIFQPDMGHPVSQQPSRPASRNAFDENVDS
TNNQSPSASQGIGAPPPYSYAAVLGSSLSRNGTPDPQAVARVPSP
CLTPIGSGRVSSNDKRNTSNQSPFNGVTSGLNESSDLVNALSGMN
LSGSGGLDDRGQAEQDVEKVRNYMFGFQGGHNEVSQHVFPNKSDQ
AQKATGSLRNLHMRGSQGSAYNGGGLANPYQHLDSPNYCLNNYAL
NPAVASVMANQLGNSNFSPMYDNYSAASALGFSGMDSRLHGGGFE
SRNLGRSNRMMGGGGLQSHMADPMYHQYGRYSENVDALDLLNDPA
MDRSFMGNSYMNMLELQRAYLGAQKSQYGVPYKSGSPNSHSYYGS
PTFGSNMSYPGSPLAHHAMQNSLMSPCSPMRRGEVNMRYPSATRN
YSGGVMGSWHMDASLDEGFGSSLLEEFKSNKTRGFELSEIAGHVV
EFSADQYGSRFIQQKLETATTDEKNMVYEEIMPHALALMTDVFGN
YVIQKFFEHGLPPQRRELGDKLFENVLPLSLQMYGCRVIQKAIEV
VDLDQKIKMVKELDGHVMRCVRDQNGNHVVQKCIECVPEENIEFI
ISTFFGHVVSLSTHPYGCRVIQRVLEHCHDPDTQSKVMEEILSTV
SMLAQDQYGNYVVQHVLEHGKPDERTVIIKELAGKIVQMSQQKFA
SNVVEKCLTFGGPEERELLVNEMLGTTDENEPLQAMMKDQFANYV
VQKVLETCDDQQRELILTRIKVHLNALKKYTYGKHVVARIEKLV
AAGGMHMFLLFPLGLKEENGFAVPNPASDVVRPQVLYSLTRVDGS
AIAF.

[0165] In some embodiments, a first polypeptide comprising PUM-HD, or a fragment or derivative thereof, comprises the amino acid sequence of SEQ ID NO: 184 with at least 1, at least 2, at least 3, at least 4, at least 5, at least 6, at least 7, at least 8, at least 9, at least 10, at least 11, at least 12, at least 13, at least 14, at least 15, at least 16, at least 17, at least 18, at least 19, at least 20, at least 21, at least 22, at least 23, at least 24, at least 25 or more amino acid mutations. In some embodiments, the first polypeptide comprising PUM-HD, or fragment or derivative thereof, comprises a sequence with at least 90%, at least 95%, at least 97%, or at least 99% identity to SEQ ID NO: 184.

[0166] In some embodiments, the first polypeptide is a fibronectin (FN). In some embodiments, the fibronectin is a fibronectin type III (FN3) repeat. FN3 repeats are both the largest and the most common of the fibronectin subdomains. Domains homologous to FN3 repeats have been found in various animal protein families including other extracellular-matrix molecules, cell-surface receptors, enzymes, and muscle protein. FN3 domains have a conserved beta sandwich fold with one beta sheet containing four strands and the other sheet containing three strands. The amino acid sequence of an exemplary fibronectin (see e.g., UniProt Accession No. P02751) is:

(SEQ ID NO: 26)
MLRGPGPGLLLLAVQCLGTAVPSTGASKSKRQAQQMVQPQSPVAV
SQSKPGCYDNGKHYQINQQWERTYLGNALVCTCYGGSRGFNCESK
PEAEETCFDKYTGNTYRVGDTYERPKDSMIWDCTCIGAGRGRISC
TIANRCHEGGQSYKIGDTWRRPHETGGYMLECVCLGNGKGEWTCK
PIAEKCFDHAAGTSYVVGETWEKPYQGWMMVDCTCLGEGSGRITC
TSRNRCNDQDTRTSYRIGDTWSKKDNRGNLLQCICTGNGRGEWKC
ERHTSVQTTSSGSGPFTDVRAAVYQPQPHPQPPPYGHCVTDSGVV
YSVGMQWLKTQGNKQMLCTCLGNGVSCQETAVTQTYGGNSNGEPC
VLPFTYNGRTFYSCTTEGRQDGHLWCSTTSNYEQDQKYSFCTDHT
VLVQTRGGNSNGALCHFPFLYNNHNYTDCTSEGRRDNMKWCGTTQ
NYDADQKFGFCPMAAHEEICTTNEGVMYRIGDQWDKQHDMGHMMR
CTCVGNGRGEWTCIAYSQLRDQCIVDDITYNVNDTFHKRHEEGHM
LNCTCFGQGRGRWKCDPVDQCQDSETGTFYQIGDSWEKYVHGVRY
QCYCYGRGIGEWHCQPLQTYPSSSGPVEVFITETPSQPNSHPIQW
NAPQPSHISKYILRWRPKNSVGRWKEATIPGHLNSYTIKGLKPGV
VYEGQLISIQQYGHQEVTRFDFTTTSTSTPVTSNTVTGETTPFSP
LVATSESVTEITASSFVVSWVSASDTVSGFRVEYELSEEGDEPQY
LDLPSTATSVNIPDLLPGRKYIVNVYQISEDGEQSLILSTSQTTA
PDAPPDTTVDQVDDTSIVVRWSRPQAPITGYRIVYSPSVEGSSTE
LNLPETANSVTLSDLQPGVQYNITIYAVEENQESTPVVIQQETT
GTPRSDTVPSPRDLQFVEVTDVKVTIMWTPPESAVTGYRVDVIPV
NLPGEHGQRLPISRNTFAEVTGLSPGVTYYFKVFAVSHGRESKPL
TAQQTTKLDAPTNLQFVNETDSTVLVRWTPPRAQITGYRLTVGLT
RRGQPRQYNVGPSVSKYPLRNLQPASEYTVSLVAIKGNQESPKAT
GVFTTLQPGSSIPPYNTEVTETTIVITWTPAPRIGFKLGVRPSQG
GEAPREVTSDSGSIVVSGLTPGVEYVYTIQVLRDGQERDAPIVNK
VVTPLSPPTNLHLEANPDTGVLTVSWERSTTPDITGYRITTTPTN
GQQGNSLEEVVHADQSSCTFDNLSPGLEYNVSVYTVKDDKESVPI
SDTIIPEVPQLTDLSFVDITDSSIGLRWTPLNSSTIIGYRITVVA
AGEGIPIFEDFVDSSVGYYTVTGLEPGIDYDISVITLINGGESAP
TTLTQQTAVPPPTDLRFTNIGPDTMRVTWAPPPSIDLTNFLVRYS
PVKNEEDVAELSISPSDNAVVLTNLLPGTEYVVSVSSVYEQHEST
PLRGRQKTGLDSPTGIDFSDITANSFTVHWIAPRATITGYRIRHH
PEHFSGRPREDRVPHSRNSITLTNLTPGTEYVVSIVALNGREESP
LLIGQQSTVSDVPRDLEVVAATPTSLLISWDAPAVTVRYYRITYG
ETGGNSPVQEFTVPGSKSTATISGLKPGVDYTITVYAVTGRGDSP
ASSKPISINYRTEIDKPSQMQVTDVQDNSISVKWLPSSSPVTGYR
VTTTPKNGPGPTKTKTAGPDQTEMTIEGLQPTVEYVVSVYAQNPS
GESQPLVQTAVTNIDRPKGLAFTDVDVDSIKIAWESPQGQVSRYR
VTYSSPEDGIHELFPAPDGEEDTAELQGLRPGSEYTVSVVALHDD
MESQPLIGTQSTAIPAPTDLKFTQVTPTSLSAQWTPPNVQLTGYR
VRVTPKEKTGPMKEINLAPDSSSVVVSGLMVATKYEVSVYALKDT
LTSRPAQGVVTTLENVSPPRRARVTDATETTITISWRTKTETITG
FQVDAVPANGQTPIQRTIKPDVRSYTITGLQPGTDYKIYLYTLND
NARSSPVVIDASTAIDAPSNLRFLATTPNSLLVSWQPPRARITGY
IIKYEKPGSPPREVVPRPRPGVTEATITGLEPGTEYTIYVIALKN
NQKSEPLIGRKKTDELPQLVTLPHPNLHGPEILDVPSTVQKTPFV
THPGYDTGNGIQLPGTSGQQPSVGQQMIFEEHGFRRTTPPTTATP
IRHRPRPYPPNVGEEIQIGHIPREDVDYHLYPHGPGLNPNASTGQ
EALSQTTISWAPFQDTSEYIISCHPVGTDEEPLQFRVPGTSTSAT
LTGLTRGATYNVIVEALKDQQRHKVREEVVTVGNSVNEGLNQPTD
DSCFDPYTVSHYAVGDEWERMSESGFKLLCQCLGFGSGHFRCDSS
RWCHDNGVNYKIGEKWDRQGENGQMMSCTCLGNGKGEFKCDPHEA
TCYDDGKTYHVGEQWQKEYLGAICSCTCFGGQRGWRCDNCRRPGG
EPSPEGTTGQSYNQYSQRYHQRTNTNVNCPIECFMPLDVQADRED
SRE.

[0167] In some embodiments, the first polypeptide comprising fibronectin, or a fragment or derivative thereof, has the amino acid sequence of SEQ ID NO: 26 with at least 1, at least 2, at least 3, at least 4, at least 5, at least 6, at least 7, at least 8, at least 9, at least 10, at least 11, at least 12, at least 13, at least 14, at least 15, at least 16, at least 17, at least 18, at least 19, at least 20, at least 21, at least 22, at least 23, at least 24, at least 25 or more amino acid mutations. In some embodiments, the first polypeptide comprising fibronectin, or fragment or derivative thereof, comprises a sequence with at least 90%, at least 95%, at least 97%, or at least 99% identity to SEQ ID NO: 26.

[0168] In some embodiments, the first polypeptide is an adeno-associated virus receptor (AAVR), or a fragment or derivative thereof. The AAVR, also named KIAA0319L (see, e.g., Uniprot Accession No. Q8IZA0), is a 150 kDa glycoprotein which binds to the capsid of multiple AAV serotypes, including AAV1, AAV2, AAV3B, AAV5, AAV6, AAV8, and AAV9. The following references describe the AAVR and are incorporated by reference herein in their entirety: Zhang et al. Nat Microbiol. 2019 April; 4(4):675-682; Pillay et al. Nature. 2016 Feb. 4; 530(7588): 108-12; Zhang et al. Nat Commun. 2019 Aug. 21; 10(1):3760; Summerford et al. Mol Ther. 2016 April; 24(4):663-6.

[0169] The ectodomain of the AAVR comprises a motif at the N-terminus with eight cysteines (MANEC) and five immunoglobulin domains known as polycystic kidney disease (PKD) domains. AAV particles bind to the PKD domains to facilitate transduction. Thus, in some embodiments, an AAVR fragment or derivative thereof comprises one, two, three, four, or five PKD domains, or fragments or derivatives thereof. In some embodiments, the AAVR is the human AAVR (SEQ ID NO: 35), mouse AAVR (SEQ ID NO: 36), or orangutan AAVR (SEQ ID NO: 42), or a fragment or derivative thereof. In some embodiments, the AAVR comprises a sequence with at least 90%, at least 95%, at least 97%, or at least 99% identity to any one of SEQ ID NO: 35, 36, or 42. Unless otherwise indicated, sequence identity is determined using the National Center for Biotechnology Information (NCBI)'s Basic Local Alignment Search Tool (BLAST®), available at blast.ncbi.nlm.nih.gov/Blast.cgi. In some embodiments, the sequence identity is calculated over the entire length of the compared sequences. In some embodiments, the sequence identity is calculated over a 20-amino acid, 50-amino acid, 75-amino acid, 100-amino acid, 250-amino acid, 500-amino acid, 750-amino acid, or 1000-amino acid fragment of each compared sequence.

[0170] In some embodiments, the AAVR fragment or derivative thereof comprises an ectodomain of AAVR or a fragment or derivative thereof. In some embodiments, the AAVR comprises the amino acid sequence of SEQ ID NO: 33 or SEQ ID NO: 34, or a sequence with at least about 70%, about 75%, about 80%, about 85%, about 90%, about 95%, about 96%, about 97%, about 98%, about 99% identity thereto. In some embodiments, the AAV-binding polypeptide comprises the sequence of SEQ ID NO: 33 or SEQ ID NO: 34 with at least 1, at least 2, at least 3, at least 4, at least 5, at least 6, at least 7, at least 8, at least 9, at least 10, at least 11, at least 12, at least 13, at least 14, at least 15, at least 16, at least 17, at least 18, at least 19, at least 20, at least 21, at least 22, at least 23, at least 24, at least 25 or more amino acid mutations.

[0171] In some embodiments, the AAVR, or fragment or derivative thereof, comprises one or more PKDs, such as two, three, four, five, or more PKDs. In some embodiments, the PKDs are each individually selected from the PKDs listed in Table 3. For example, in some embodiments, the PKDs are each individually selected from SEQ ID NO: 28-32, 37-41, and 43-47. In some embodiments, an AAVR, or fragment or derivative thereof, comprises multiple PKDs, and the PKDs are connected to one another by a linker. Non-limiting examples of linkers are described throughout this disclosure. In some embodiments, an AAVR, or fragment or derivative thereof comprises multiple PKD domains, wherein each PKD domain has the same or substantially the same sequence. In some embodiments, an AAVR, or fragment or derivative thereof, comprises multiple PKD domains, wherein each PKD has a different sequence.

TABLE 3
Amino Acid Sequences of PKDs

| PKD | SEQ ID NO. |
|---|---|
| Human PKD1 | 28 |
| Human PKD2 | 29 |
| Human PKD3 | 30 |
| Human PKD4 | 31 |
| Human PKD5 | 32 |
| Mouse PKD1 | 37 |
| Mouse PKD2 | 38 |
| Mouse PKD3 | 39 |
| Mouse PKD4 | 40 |
| Mouse PKD5 | 41 |
| Orangutan PKD1 | 43 |
| Orangutan PKD2 | 44 |
| Orangutan PKD3 | 45 |
| Orangutan PKD4 | 46 |
| Orangutan PKD5 | 47 |

[0172] In some embodiments, the AAVR, or fragment or derivative thereof, comprises a polycystic kidney disease 1 (PKD1) domain, polycystic kidney disease 2 (PKD2) domain, a polycystic kidney disease 3 (PKD3) domain, a polycystic kidney disease 4 (PKD4) domain, a polycystic kidney disease 5 (PKD5) domain, or a combination thereof.

[0173] In some embodiments, the AAVR, or fragment or derivative thereof comprises a PKD1 and a PKD2 domain. In some embodiments, the AAVR, or fragment or derivative thereof comprises a PKD1 and a PKD2 domain having an amino acid sequence of SEQ ID NO: 92. In some embodiments, the AAVR, or fragment or derivative thereof comprises a PKD1 and a PKD3 domain. In some embodiments, the AAVR, or fragment or derivative thereof comprises a PKD1 and a PKD4 domain. In some embodiments, the AAVR, or fragment or derivative thereof comprises a PKD1 and a PKD5 domain. In some embodiments, the AAVR, or fragment or derivative thereof comprises a PKD2 and a PKD3 domain. In some embodiments, the AAVR, or fragment or derivative thereof comprises a PKD2 and a PKD4 domain. In some embodiments, the AAVR, or fragment or derivative thereof comprises a PKD2 and a PKD5 domain. In some embodiments, the AAVR, or fragment or derivative thereof comprises a PKD3 and a PKD4 domain. In some embodiments, the AAVR, or fragment or derivative thereof comprises a PKD3 and a PKD5 domain. In some embodiments, the AAVR, or fragment or derivative thereof comprises a PKD4 and a PKD5 domain. In some embodiments, the AAVR, or fragment or derivative thereof comprises three PKD domains, wherein each PKD domain is independently selected from any one of PKD1-5. In some embodiments, the AAVR, or fragment or derivative thereof comprises four PKD domains, wherein each PKD domain is independently selected from any one of PKD1-5. In some embodiments, the AAVR, or fragment or derivative thereof comprises five PKD domains, wherein each PKD domain is independently selected from any one of PKD1-5. In some embodiments, the AAVR, or fragment or derivative thereof more than five PKD domains, wherein each PKD domain is independently selected from any one of PKD1-5.

[0174] In any of the embodiments of the preceding paragraph, each of the PKD domains may be independently selected from a wildtype or a mutant PKD domain. In some embodiments, each PKD may have at least 70%, at least 80%, at least 85%, at least 90%, at least 95%, at least 96%, at least 97%, at least 98%, at least 99%, or at least 100% sequence identity to a wild type PKD. In some embodiments, the AAVR, or fragment or derivative thereof disclosed herein comprise an amino acid sequence with at least about 70%, at least about 75%, at least about 80%, at least about 85%, at least about 90%, or at least about 95% sequence identity to a wild type PKD. In some embodiment, the AAVR, or fragment or derivative thereof bind to AAV using one or more PKDs.

[0175] In some embodiments, the AAVR, or fragment or derivative thereof described herein comprise at least about 1, at least about 2, at least about 3, at least about 4, at least about 5, at least about 6, at least about 7, at least about 8, at least about 9, at least about 10, at least about 11, at least about 12, at least about 13, at least about 14, at least about 15, at least about 16, at least about 17, at least about 18, at least about 19, at least about 20, at least about 21, at least about 22, at least about 23, at least about 24, at least about 25 amino acid mutations relative to a wild-type AAVR or PKD thereof. In some embodiments, the AAVR, or fragment or derivative thereof comprise up to about 25 amino acid mutations, or more, relative to a wildtype AAVR or PKD thereof. For example, the AAV binding polypeptides may comprise about 25-35, about 35-45, about 45-55, about 55-65, or about 65-75 amino acid mutations relative to a wildtype AAVR.

[0176] In some embodiments, the AAVR, or fragment or derivative thereof described herein comprise at least about 1, at least about 2, at least about 3, at least about 4, at least about 5, at least about 6, at least about 7, at least about 8, at least about 9, at least about 10, at least about 11, at least about 12, at least about 13, at least about 14, at least about 15, at least about 16, at least about 17, at least about 18, at least about 19, at least about 20, at least about 21, at least about 22, at least about 23, at least about 24, at least about 25 amino acid mutations relative to a wild type AAVR or PKD thereof, wherein each mutation comprises a change of a native amino acid residue to a histidine.

[0177] In some embodiments, the AAVR, or fragment or derivative thereof comprises a sequence of SEQ ID NO: 29. In some embodiments, the AAVR, or fragment or derivative thereof comprises a sequence of SEQ ID NO: 29, wherein at least one amino acid (i.e., a non-histidine amino acid) is mutated to histidine.

[0178] In some embodiments, the AAVR, or fragment or derivative thereof comprises SEQ ID NO: 35 with at least one, at least two, at least three, at least four, or at least five mutations. In some embodiments, each mutation is individually selected from the group consisting of V440H, S431H, Q432H, T434H, Y442H, I462H, D435H, D436H, K438H, and I439H.

[0179] In some embodiments, the AAVR, or fragment or derivative thereof comprises amino acids 411 to 499 of SEQ ID NO: 35 with at least one, at least two, at least three, at least four, or at least five mutations, wherein each mutation is individually selected from the group consisting of V440H, S431H, Q432H, T434H, Y442H, 1462H, D435H, D436H, K438H, and I439H.

[0180] In some embodiments, the AAVR, having an amino acid sequence of SEQ ID NO: 35, or a fragment or derivative thereof, has one or more of the combinations of mutations in Table 4. Each row in Table 4 signifies a combination of mutations.

TABLE 4
Combinations of Mutations

| Mutation 1 | Mutation 2 | Mutation 3 | Mutation 4 | Mutation 5 |
|---|---|---|---|---|
| S431H | V440H | | | |
| Q432H | V440H | | | |
| Q432H | S431H | | | |
| T434H | V440H | | | |
| T434H | S431H | | | |
| T434H | Q432H | | | |
| Y442H | V440H | | | |
| Y442H | S431H | | | |
| Y442H | Q432H | | | |
| Y442H | T434H | | | |
| I462H | V440H | | | |
| I462H | S431H | | | |
| I462H | Q432H | | | |
| I462H | T434H | | | |
| I462H | Y442H | | | |
| D435H | V440H | | | |
| D435H | S431H | | | |
| D435H | Q432H | | | |
| D435H | T434H | | | |
| D435H | Y442H | | | |
| D436H | V440H | | | |
| D436H | S431H | | | |
| D436H | Q432H | | | |
| D436H | T434H | | | |
| D436H | Y442H | | | |
| D435H | I462H | | | |
| D436H | I462H | | | |
| D436H | D435H | | | |
| I439H | V440H | | | |
| I439H | S431H | | | |
| I439H | Q432H | | | |
| I439H | T434H | | | |
| I439H | Y442H | | | |
| K438H | V440H | | | |
| K438H | S431H | | | |
| K438H | Q432H | | | |
| K438H | T434H | | | |
| I439H | I462H | | | |
| K438H | Y442H | | | |
| I439H | D435H | | | |
| I439H | D436H | | | |
| K438H | I462H | | | |
| K438H | D435H | | | |
| K438H | D436H | | | |
| I439H | K438H | | | |
| S431H | V440H | Q432H | | |
| S431H | V440H | T434H | | |
| Q432H | V440H | T434H | | |
| Q432H | S431H | T434H | | |
| S431H | V440H | Y442H | | |
| Q432H | V440H | Y442H | | |
| Q432H | S431H | Y442H | | |
| T434H | V440H | Y442H | | |
| T434H | S431H | Y442H | | |
| T434H | Q432H | Y442H | | |
| S431H | V440H | I462H | | |
| Q432H | V440H | I462H | | |
| Q432H | S431H | I462H | | |
| T434H | V440H | I462H | | |
| T434H | S431H | I462H | | |
| T434H | Q432H | I462H | | |
| Y442H | V440H | I462H | | |
| Y442H | S431H | I462H | | |
| Y442H | Q432H | I462H | | |
| Y442H | T434H | I462H | | |
| S431H | V440H | D435H | | |
| Q432H | V440H | D435H | | |
| Q432H | S431H | D435H | | |
| T434H | V440H | D435H | | |
| T434H | S431H | D435H | | |
| T434H | Q432H | D435H | | |
| Y442H | V440H | D435H | | |
| Y442H | S431H | D435H | | |
| Y442H | Q432H | D435H | | |
| Y442H | T434H | D435H | | |
| S431H | V440H | D436H | | |
| Q432H | V440H | D436H | | |
| Q432H | S431H | D436H | | |
| T434H | V440H | D436H | | |
| T434H | S431H | D436H | | |
| T434H | Q432H | D436H | | |
| Y442H | V440H | D436H | | |
| Y442H | S431H | D436H | | |
| Y442H | Q432H | D436H | | |
| Y442H | T434H | D436H | | |
| I462H | V440H | D435H | | |
| I462H | S431H | D435H | | |
| I462H | Q432H | D435H | | |
| I462H | T434H | D435H | | |
| I462H | Y442H | D435H | | |
| I462H | V440H | D436H | | |
| I462H | S431H | D436H | | |
| I462H | Q432H | D436H | | |
| I462H | T434H | D436H | | |
| I462H | Y442H | D436H | | |
| D435H | V440H | D436H | | |
| D435H | S431H | D436H | | |
| D435H | Q432H | D436H | | |
| D435H | T434H | D436H | | |
| D435H | Y442H | D436H | | |
| D435H | I462H | D436H | | |
| S431H | V440H | I439H | | |
| Q432H | V440H | I439H | | |
| Q432H | S431H | I439H | | |
| T434H | V440H | I439H | | |
| T434H | S431H | I439H | | |
| T434H | Q432H | I439H | | |
| Y442H | V440H | I439H | | |
| Y442H | S431H | I439H | | |
| Y442H | Q432H | I439H | | |
| Y442H | T434H | I439H | | |
| S431H | V440H | K438H | | |
| Q432H | V440H | K438H | | |
| Q432H | S431H | K438H | | |
| T434H | V440H | K438H | | |
| T434H | S431H | K438H | | |
| T434H | Q432H | K438H | | |
| I462H | V440H | I439H | | |
| I462H | S431H | I439H | | |
| Y442H | V440H | K438H | | |
| I462H | Q432H | I439H | | |
| Y442H | S431H | K438H | | |
| I462H | T434H | I439H | | |
| Y442H | Q432H | K438H | | |
| Y442H | T434H | K438H | | |
| I462H | Y442H | I439H | | |
| D435H | V440H | I439H | | |
| D435H | S431H | I439H | | |
| D435H | Q432H | I439H | | |
| D435H | T434H | I439H | | |
| D435H | Y442H | I439H | | |
| D436H | V440H | I439H | | |
| D436H | S431H | I439H | | |
| D436H | Q432H | I439H | | |
| D436H | T434H | I439H | | |
| I462H | V440H | K438H | | |
| I462H | S431H | K438H | | |
| I462H | Q432H | K438H | | |
| I462H | T434H | K438H | | |
| D436H | Y442H | I439H | | |
| I462H | Y442H | K438H | | |
| D435H | V440H | K438H | | |
| D435H | S431H | K438H | | |
| D435H | Q432H | K438H | | |
| D435H | T434H | K438H | | |
| D435H | I462H | I439H | | |
| D435H | Y442H | K438H | | |
| D436H | V440H | K438H | | |
| D436H | S431H | K438H | | |
| D436H | Q432H | K438H | | |
| D436H | T434H | K438H | | |
| D436H | I462H | I439H | | |
| D436H | Y442H | K438H | | |
| D436H | D435H | I439H | | |
| D435H | I462H | K438H | | |
| D436H | I462H | K438H | | |
| D436H | D435H | K438H | | |
| I439H | V440H | K438H | | |
| I439H | S431H | K438H | | |
| I439H | Q432H | K438H | | |
| I439H | T434H | K438H | | |
| I439H | Y442H | K438H | | |
| I439H | I462H | K438H | | |
| I439H | D435H | K438H | | |
| I439H | D436H | K438H | | |
| S431H | V440H | Q432H | T434H | |
| S431H | V440H | Q432H | Y442H | |
| S431H | V440H | T434H | Y442H | |
| Q432H | V440H | T434H | Y442H | |
| Q432H | S431H | T434H | Y442H | |
| S431H | V440H | Q432H | I462H | |
| S431H | V440H | T434H | I462H | |
| Q432H | V440H | T434H | I462H | |
| Q432H | S431H | T434H | I462H | |
| S431H | V440H | Y442H | I462H | |
| Q432H | V440H | Y442H | I462H | |
| Q432H | S431H | Y442H | I462H | |
| T434H | V440H | Y442H | I462H | |
| T434H | S431H | Y442H | I462H | |
| T434H | Q432H | Y442H | I462H | |
| S431H | V440H | Q432H | D435H | |
| S431H | V440H | T434H | D435H | |
| Q432H | V440H | T434H | D435H | |
| Q432H | S431H | T434H | D435H | |
| S431H | V440H | Y442H | D435H | |
| Q432H | V440H | Y442H | D435H | |
| Q432H | S431H | Y442H | D435H | |
| T434H | V440H | Y442H | D435H | |
| T434H | S431H | Y442H | D435H | |
| T434H | Q432H | Y442H | D435H | |
| S431H | V440H | Q432H | D436H | |
| S431H | V440H | T434H | D436H | |
| Q432H | V440H | T434H | D436H | |
| Q432H | S431H | T434H | D436H | |
| S431H | V440H | Y442H | D436H | |
| Q432H | V440H | Y442H | D436H | |
| Q432H | S431H | Y442H | D436H | |
| T434H | V440H | Y442H | D436H | |
| T434H | S431H | Y442H | D436H | |
| T434H | Q432H | Y442H | D436H | |
| S431H | V440H | I462H | D435H | |
| Q432H | V440H | I462H | D435H | |
| Q432H | S431H | I462H | D435H | |
| T434H | V440H | I462H | D435H | |
| T434H | S431H | I462H | D435H | |
| T434H | Q432H | I462H | D435H | |
| Y442H | V440H | I462H | D435H | |
| Y442H | S431H | I462H | D435H | |
| Y442H | Q432H | I462H | D435H | |
| Y442H | T434H | I462H | D435H | |
| S431H | V440H | I462H | D436H | |
| Q432H | V440H | I462H | D436H | |
| Q432H | S431H | I462H | D436H | |
| T434H | V440H | I462H | D436H | |
| T434H | S431H | I462H | D436H | |
| T434H | Q432H | I462H | D436H | |
| Y442H | V440H | I462H | D436H | |
| Y442H | S431H | I462H | D436H | |
| Y442H | Q432H | I462H | D436H | |
| Y442H | T434H | I462H | D436H | |
| S431H | V440H | D435H | D436H | |
| Q432H | V440H | D435H | D436H | |
| Q432H | S431H | D435H | D436H | |
| T434H | V440H | D435H | D436H | |
| T434H | S431H | D435H | D436H | |
| T434H | Q432H | D435H | D436H | |
| Y442H | V440H | D435H | D436H | |
| Y442H | S431H | D435H | D436H | |
| Y442H | Q432H | D435H | D436H | |
| Y442H | T434H | D435H | D436H | |
| I462H | V440H | D435H | D436H | |
| I462H | S431H | D435H | D436H | |
| I462H | Q432H | D435H | D436H | |
| I462H | T434H | D435H | D436H | |
| I462H | Y442H | D435H | D436H | |
| S431H | V440H | Q432H | I439H | |
| S431H | V440H | T434H | I439H | |
| Q432H | V440H | T434H | I439H | |
| Q432H | S431H | T434H | I439H | |
| S431H | V440H | Y442H | I439H | |
| Q432H | V440H | Y442H | I439H | |
| Q432H | S431H | Y442H | I439H | |
| T434H | V440H | Y442H | I439H | |
| T434H | S431H | Y442H | I439H | |
| T434H | Q432H | Y442H | I439H | |
| S431H | V440H | Q432H | K438H | |
| S431H | V440H | T434H | K438H | |
| Q432H | V440H | T434H | K438H | |
| Q432H | S431H | T434H | K438H | |
| S431H | V440H | I462H | I439H | |
| Q432H | V440H | I462H | I439H | |
| S431H | V440H | Y442H | K438H | |
| Q432H | S431H | I462H | I439H | |
| T434H | V440H | I462H | I439H | |
| Q432H | V440H | Y442H | K438H | |
| T434H | S431H | I462H | I439H | |
| Q432H | S431H | Y442H | K438H | |
| T434H | V440H | Y442H | K438H | |
| T434H | Q432H | I462H | I439H | |
| T434H | S431H | Y442H | K438H | |
| T434H | Q432H | Y442H | K438H | |
| Y442H | V440H | I462H | I439H | |
| Y442H | S431H | I462H | I439H | |
| Y442H | Q432H | I462H | I439H | |
| Y442H | T434H | I462H | I439H | |
| S431H | V440H | D435H | I439H | |
| Q432H | V440H | D435H | I439H | |
| Q432H | S431H | D435H | I439H | |
| T434H | V440H | D435H | I439H | |
| T434H | S431H | D435H | I439H | |
| T434H | Q432H | D435H | I439H | |
| Y442H | V440H | D435H | I439H | |
| Y442H | S431H | D435H | I439H | |
| Y442H | Q432H | D435H | I439H | |
| Y442H | T434H | D435H | I439H | |
| S431H | V440H | D436H | I439H | |
| Q432H | V440H | D436H | I439H | |
| Q432H | S431H | D436H | I439H | |
| T434H | V440H | D436H | I439H | |
| T434H | S431H | D436H | I439H | |
| T434H | Q432H | D436H | I439H | |
| S431H | V440H | I462H | K438H | |
| Q432H | V440H | I462H | K438H | |
| Q432H | S431H | I462H | K438H | |
| T434H | V440H | I462H | K438H | |
| T434H | S431H | I462H | K438H | |
| T434H | Q432H | I462H | K438H | |
| Y442H | V440H | D436H | I439H | |
| Y442H | S431H | D436H | I439H | |
| Y442H | Q432H | D436H | I439H | |
| Y442H | T434H | D436H | I439H | |
| Y442H | V440H | I462H | K438H | |
| Y442H | S431H | I462H | K438H | |
| Y442H | Q432H | I462H | K438H | |
| Y442H | T434H | I462H | K438H | |
| S431H | V440H | D435H | K438H | |
| Q432H | V440H | D435H | K438H | |
| Q432H | S431H | D435H | K438H | |
| T434H | V440H | D435H | K438H | |
| T434H | S431H | D435H | K438H | |
| T434H | Q432H | D435H | K438H | |
| I462H | V440H | D435H | I439H | |
| I462H | S431H | D435H | I439H | |
| Y442H | V440H | D435H | K438H | |
| I462H | Q432H | D435H | I439H | |
| Y442H | S431H | D435H | K438H | |
| I462H | T434H | D435H | I439H | |
| Y442H | Q432H | D435H | K438H | |
| Y442H | T434H | D435H | K438H | |
| I462H | Y442H | D435H | I439H | |
| S431H | V440H | D436H | K438H | |
| Q432H | V440H | D436H | K438H | |
| Q432H | S431H | D436H | K438H | |
| T434H | V440H | D436H | K438H | |
| T434H | S431H | D436H | K438H | |
| T434H | Q432H | D436H | K438H | |
| I462H | V440H | D436H | I439H | |
| I462H | S431H | D436H | I439H | |
| Y442H | V440H | D436H | K438H | |
| I462H | Q432H | D436H | I439H | |
| Y442H | S431H | D436H | K438H | |
| I462H | T434H | D436H | I439H | |
| Y442H | Q432H | D436H | K438H | |
| Y442H | T434H | D436H | K438H | |
| I462H | Y442H | D436H | I439H | |
| D435H | V440H | D436H | I439H | |
| D435H | S431H | D436H | I439H | |
| D435H | Q432H | D436H | I439H | |
| D435H | T434H | D436H | I439H | |
| I462H | V440H | D435H | K438H | |
| I462H | S431H | D435H | K438H | |
| I462H | Q432H | D435H | K438H | |
| I462H | T434H | D435H | K438H | |
| D435H | Y442H | D436H | I439H | |
| I462H | Y442H | D435H | K438H | |
| I462H | V440H | D436H | K438H | |
| I462H | S431H | D436H | K438H | |
| I462H | Q432H | D436H | K438H | |
| I462H | T434H | D436H | K438H | |
| I462H | Y442H | D436H | K438H | |
| D435H | V440H | D436H | K438H | |
| D435H | S431H | D436H | K438H | |
| D435H | Q432H | D436H | K438H | |
| D435H | T434H | D436H | K438H | |
| D435H | I462H | D436H | I439H | |
| D435H | Y442H | D436H | K438H | |
| D435H | I462H | D436H | K438H | |
| S431H | V440H | I439H | K438H | |
| Q432H | V440H | I439H | K438H | |
| Q432H | S431H | I439H | K438H | |
| T434H | V440H | I439H | K438H | |
| T434H | S431H | I439H | K438H | |
| T434H | Q432H | I439H | K438H | |
| Y442H | V440H | I439H | K438H | |
| Y442H | S431H | I439H | K438H | |
| Y442H | Q432H | I439H | K438H | |
| Y442H | T434H | I439H | K438H | |
| I462H | V440H | I439H | K438H | |
| I462H | S431H | I439H | K438H | |
| I462H | Q432H | I439H | K438H | |
| I462H | T434H | I439H | K438H | |
| I462H | Y442H | I439H | K438H | |
| D435H | V440H | I439H | K438H | |
| D435H | S431H | I439H | K438H | |
| D435H | Q432H | I439H | K438H | |
| D435H | T434H | I439H | K438H | |
| D435H | Y442H | I439H | K438H | |
| D436H | V440H | I439H | K438H | |
| D436H | S431H | I439H | K438H | |
| D436H | Q432H | I439H | K438H | |
| D436H | T434H | I439H | K438H | |
| D436H | Y442H | I439H | K438H | |
| D435H | I462H | I439H | K438H | |
| D436H | I462H | I439H | K438H | |
| D436H | D435H | I439H | K438H | |
| S431H | V440H | Q432H | T434H | Y442H |
| S431H | V440H | Q432H | T434H | I462H |
| S431H | V440H | Q432H | Y442H | I462H |
| S431H | V440H | T434H | Y442H | I462H |
| Q432H | V440H | T434H | Y442H | I462H |
| Q432H | S431H | T434H | Y442H | I462H |
| S431H | V440H | Q432H | T434H | D435H |
| S431H | V440H | Q432H | Y442H | D435H |
| S431H | V440H | T434H | Y442H | D435H |
| Q432H | V440H | T434H | Y442H | D435H |
| Q432H | S431H | T434H | Y442H | D435H |
| S431H | V440H | Q432H | T434H | D436H |
| S431H | V440H | Q432H | Y442H | D436H |
| S431H | V440H | T434H | Y442H | D436H |
| Q432H | V440H | T434H | Y442H | D436H |
| Q432H | S431H | T434H | Y442H | D436H |
| S431H | V440H | Q432H | I462H | D435H |
| S431H | V440H | T434H | I462H | D435H |
| Q432H | V440H | T434H | I462H | D435H |
| Q432H | S431H | T434H | I462H | D435H |
| S431H | V440H | Y442H | I462H | D435H |
| Q432H | V440H | Y442H | I462H | D435H |
| Q432H | S431H | Y442H | I462H | D435H |
| T434H | V440H | Y442H | I462H | D435H |
| T434H | S431H | Y442H | I462H | D435H |
| T434H | Q432H | Y442H | I462H | D435H |
| S431H | V440H | Q432H | I462H | D436H |
| S431H | V440H | T434H | I462H | D436H |
| Q432H | V440H | T434H | I462H | D436H |
| Q432H | S431H | T434H | I462H | D436H |
| S431H | V440H | Y442H | I462H | D436H |
| Q432H | V440H | Y442H | I462H | D436H |
| Q432H | S431H | Y442H | I462H | D436H |
| T434H | V440H | Y442H | I462H | D436H |
| T434H | S431H | Y442H | I462H | D436H |
| T434H | Q432H | Y442H | I462H | D436H |
| S431H | V440H | Q432H | D435H | D436H |
| S431H | V440H | T434H | D435H | D436H |
| Q432H | V440H | T434H | D435H | D436H |
| Q432H | S431H | T434H | D435H | D436H |
| S431H | V440H | Y442H | D435H | D436H |
| Q432H | V440H | Y442H | D435H | D436H |
| Q432H | S431H | Y442H | D435H | D436H |
| T434H | V440H | Y442H | D435H | D436H |
| T434H | S431H | Y442H | D435H | D436H |
| T434H | Q432H | Y442H | D435H | D436H |
| S431H | V440H | I462H | D435H | D436H |
| Q432H | V440H | I462H | D435H | D436H |
| Q432H | S431H | I462H | D435H | D436H |
| T434H | V440H | I462H | D435H | D436H |
| T434H | S431H | I462H | D435H | D436H |
| T434H | Q432H | I462H | D435H | D436H |
| Y442H | V440H | I462H | D435H | D436H |
| Y442H | S431H | I462H | D435H | D436H |
| Y442H | Q432H | I462H | D435H | D436H |
| Y442H | T434H | I462H | D435H | D436H |
| S431H | V440H | Q432H | T434H | I439H |
| S431H | V440H | Q432H | Y442H | I439H |
| S431H | V440H | T434H | Y442H | I439H |
| Q432H | V440H | T434H | Y442H | I439H |
| Q432H | S431H | T434H | Y442H | I439H |
| S431H | V440H | Q432H | T434H | K438H |
| S431H | V440H | Q432H | I462H | I439H |
| S431H | V440H | T434H | I462H | I439H |
| S431H | V440H | Q432H | Y442H | K438H |
| Q432H | V440H | T434H | I462H | I439H |
| S431H | V440H | T434H | Y442H | K438H |
| Q432H | S431H | T434H | I462H | I439H |
| Q432H | V440H | T434H | Y442H | K438H |
| Q432H | S431H | T434H | Y442H | K438H |
| S431H | V440H | Y442H | I462H | I439H |
| Q432H | V440H | Y442H | I462H | I439H |
| Q432H | S431H | Y442H | I462H | I439H |
| T434H | V440H | Y442H | I462H | I439H |
| T434H | S431H | Y442H | I462H | I439H |
| T434H | Q432H | Y442H | I462H | I439H |
| S431H | V440H | Q432H | D435H | I439H |
| S431H | V440H | T434H | D435H | I439H |
| Q432H | V440H | T434H | D435H | I439H |
| Q432H | S431H | T434H | D435H | I439H |
| S431H | V440H | Y442H | D435H | I439H |
| Q432H | V440H | Y442H | D435H | I439H |
| Q432H | S431H | Y442H | D435H | I439H |
| T434H | V440H | Y442H | D435H | I439H |
| T434H | S431H | Y442H | D435H | I439H |
| T434H | Q432H | Y442H | D435H | I439H |
| S431H | V440H | Q432H | D436H | I439H |
| S431H | V440H | T434H | D436H | I439H |
| Q432H | V440H | T434H | D436H | I439H |
| Q432H | S431H | T434H | D436H | I439H |
| S431H | V440H | Q432H | I462H | K438H |
| S431H | V440H | T434H | I462H | K438H |
| Q432H | V440H | T434H | I462H | K438H |
| Q432H | S431H | T434H | I462H | K438H |
| S431H | V440H | Y442H | D436H | I439H |
| Q432H | V440H | Y442H | D436H | I439H |
| Q432H | S431H | Y442H | D436H | I439H |
| T434H | V440H | Y442H | D436H | I439H |
| T434H | S431H | Y442H | D436H | I439H |
| T434H | Q432H | Y442H | D436H | I439H |
| S431H | V440H | Y442H | I462H | K438H |
| Q432H | V440H | Y442H | I462H | K438H |
| Q432H | S431H | Y442H | I462H | K438H |
| T434H | V440H | Y442H | I462H | K438H |
| T434H | S431H | Y442H | I462H | K438H |
| T434H | Q432H | Y442H | I462H | K438H |
| S431H | V440H | Q432H | D435H | K438H |
| S431H | V440H | T434H | D435H | K438H |
| Q432H | V440H | T434H | D435H | K438H |
| Q432H | S431H | T434H | D435H | K438H |
| S431H | V440H | I462H | D435H | I439H |
| Q432H | V440H | I462H | D435H | I439H |
| S431H | V440H | Y442H | D435H | K438H |
| Q432H | S431H | I462H | D435H | I439H |
| T434H | V440H | I462H | D435H | I439H |
| Q432H | V440H | Y442H | D435H | K438H |
| T434H | S431H | I462H | D435H | I439H |
| Q432H | S431H | Y442H | D435H | K438H |
| T434H | V440H | Y442H | D435H | K438H |
| T434H | Q432H | I462H | D435H | I439H |
| T434H | S431H | Y442H | D435H | K438H |
| T434H | Q432H | Y442H | D435H | K438H |
| Y442H | V440H | I462H | D435H | I439H |
| Y442H | S431H | I462H | D435H | I439H |
| Y442H | Q432H | I462H | D435H | I439H |
| Y442H | T434H | I462H | D435H | I439H |
| S431H | V440H | Q432H | D436H | K438H |
| S431H | V440H | T434H | D436H | K438H |
| Q432H | V440H | T434H | D436H | K438H |
| Q432H | S431H | T434H | D436H | K438H |
| S431H | V440H | I462H | D436H | I439H |
| Q432H | V440H | I462H | D436H | I439H |
| S431H | V440H | Y442H | D436H | K438H |
| Q432H | S431H | I462H | D436H | I439H |
| T434H | V440H | I462H | D436H | I439H |
| Q432H | V440H | Y442H | D436H | K438H |
| T434H | S431H | I462H | D436H | I439H |
| Q432H | S431H | Y442H | D436H | K438H |
| T434H | V440H | Y442H | D436H | K438H |
| T434H | Q432H | I462H | D436H | I439H |
| T434H | S431H | Y442H | D436H | K438H |
| T434H | Q432H | Y442H | D436H | K438H |
| Y442H | V440H | I462H | D436H | I439H |
| Y442H | S431H | I462H | D436H | I439H |
| Y442H | Q432H | I462H | D436H | I439H |
| Y442H | T434H | I462H | D436H | I439H |
| S431H | V440H | D435H | D436H | I439H |
| Q432H | V440H | D435H | D436H | I439H |
| Q432H | S431H | D435H | D436H | I439H |
| T434H | V440H | D435H | D436H | I439H |
| T434H | S431H | D435H | D436H | I439H |
| T434H | Q432H | D435H | D436H | I439H |
| S431H | V440H | I462H | D435H | K438H |
| Q432H | V440H | I462H | D435H | K438H |
| Q432H | S431H | I462H | D435H | K438H |
| T434H | V440H | I462H | D435H | K438H |
| T434H | S431H | I462H | D435H | K438H |
| T434H | Q432H | I462H | D435H | K438H |
| Y442H | V440H | D435H | D436H | I439H |
| Y442H | S431H | D435H | D436H | I439H |
| Y442H | Q432H | D435H | D436H | I439H |
| Y442H | T434H | D435H | D436H | I439H |
| Y442H | V440H | I462H | D435H | K438H |
| Y442H | S431H | I462H | D435H | K438H |
| Y442H | Q432H | I462H | D435H | K438H |
| Y442H | T434H | I462H | D435H | K438H |
| S431H | V440H | I462H | D436H | K438H |
| Q432H | V440H | I462H | D436H | K438H |
| Q432H | S431H | I462H | D436H | K438H |
| T434H | V440H | I462H | D436H | K438H |
| T434H | S431H | I462H | D436H | K438H |
| T434H | Q432H | I462H | D436H | K438H |
| Y442H | V440H | I462H | D436H | K438H |
| Y442H | S431H | I462H | D436H | K438H |
| Y442H | Q432H | I462H | D436H | K438H |
| Y442H | T434H | I462H | D436H | K438H |
| S431H | V440H | D435H | D436H | K438H |
| Q432H | V440H | D435H | D436H | K438H |
| Q432H | S431H | D435H | D436H | K438H |
| T434H | V440H | D435H | D436H | K438H |
| T434H | S431H | D435H | D436H | K438H |
| T434H | Q432H | D435H | D436H | K438H |
| I462H | V440H | D435H | D436H | I439H |
| I462H | S431H | D435H | D436H | I439H |
| Y442H | V440H | D435H | D436H | K438H |
| I462H | Q432H | D435H | D436H | I439H |
| Y442H | S431H | D435H | D436H | K438H |
| I462H | T434H | D435H | D436H | I439H |
| Y442H | Q432H | D435H | D436H | K438H |
| Y442H | T434H | D435H | D436H | K438H |
| I462H | Y442H | D435H | D436H | I439H |
| I462H | V440H | D435H | D436H | K438H |
| I462H | S431H | D435H | D436H | K438H |
| I462H | Q432H | D435H | D436H | K438H |
| I462H | T434H | D435H | D436H | K438H |
| I462H | Y442H | D435H | D436H | K438H |
| S431H | V440H | Q432H | I439H | K438H |
| S431H | V440H | T434H | I439H | K438H |
| Q432H | V440H | T434H | I439H | K438H |
| Q432H | S431H | T434H | I439H | K438H |
| S431H | V440H | Y442H | I439H | K438H |
| Q432H | V440H | Y442H | I439H | K438H |
| Q432H | S431H | Y442H | I439H | K438H |
| T434H | V440H | Y442H | I439H | K438H |
| T434H | S431H | Y442H | I439H | K438H |
| T434H | Q432H | Y442H | I439H | K438H |
| S431H | V440H | I462H | I439H | K438H |
| Q432H | V440H | I462H | I439H | K438H |
| Q432H | S431H | I462H | I439H | K438H |
| T434H | V440H | I462H | I439H | K438H |
| T434H | S431H | I462H | I439H | K438H |
| T434H | Q432H | I462H | I439H | K438H |
| Y442H | V440H | I462H | I439H | K438H |
| Y442H | S431H | I462H | I439H | K438H |
| Y442H | Q432H | I462H | I439H | K438H |
| Y442H | T434H | I462H | I439H | K438H |
| S431H | V440H | D435H | I439H | K438H |
| Q432H | V440H | D435H | I439H | K438H |
| Q432H | S431H | D435H | I439H | K438H |
| T434H | V440H | D435H | I439H | K438H |
| T434H | S431H | D435H | I439H | K438H |
| T434H | Q432H | D435H | I439H | K438H |
| Y442H | V440H | D435H | I439H | K438H |
| Y442H | S431H | D435H | I439H | K438H |
| Y442H | Q432H | D435H | I439H | K438H |
| Y442H | T434H | D435H | I439H | K438H |
| S431H | V440H | D436H | I439H | K438H |
| Q432H | V440H | D436H | I439H | K438H |
| Q432H | S431H | D436H | I439H | K438H |
| T434H | V440H | D436H | I439H | K438H |
| T434H | S431H | D436H | I439H | K438H |
| T434H | Q432H | D436H | I439H | K438H |
| Y442H | V440H | D436H | I439H | K438H |
| Y442H | S431H | D436H | I439H | K438H |
| Y442H | Q432H | D436H | I439H | K438H |
| Y442H | T434H | D436H | I439H | K438H |
| I462H | V440H | D435H | I439H | K438H |
| I462H | S431H | D435H | I439H | K438H |
| T462H | Q432H | D435H | I439H | K438H |
| I462H | T434H | D435H | I439H | K438H |
| I462H | Y442H | D435H | I439H | K438H |
| I462H | V440H | D436H | I439H | K438H |
| I462H | S431H | D436H | I439H | K438H |
| I462H | Q432H | D436H | I439H | K438H |
| I462H | T434H | D436H | I439H | K438H |
| I462H | Y442H | D436H | I439H | K438H |
| D435H | V440H | D436H | I439H | K438H |
| D435H | S431H | D436H | I439H | K438H |
| D435H | Q432H | D436H | I439H | K438H |
| D435H | T434H | D436H | I439H | K438H |
| D435H | Y442H | D436H | I439H | K438H |
| D435H | I462H | D436H | I439H | K438H |

[0181] In some embodiments, the AAVR, or fragment or derivative thereof, comprises SEQ ID NO: 29 with at least one, at least two, at least three, at least four, or at least five mutations, wherein each mutation is individually selected from the group consisting of S23H, Q24H, T26H, D29H, K30H, I31H, V32H, Y34H, and 154H. In some embodiments, the AAVR, or fragment or derivative thereof, comprises SEQ ID NO: 29 with V32H and V34H mutations. In some embodiments, the AAVR, or fragment or derivative thereof, comprises SEQ ID NO: 29 with S23H and Q24H mutations. In some embodiments, the AAVR, or fragment or derivative thereof, comprises SEQ ID NO: 29 with at least one, at least two, at least three, at least four, or at least five mutations, wherein each mutation is individually selected from the group consisting of S23H, Q24H, T26H, D29H, K30H, I31H, V32H, Y34H, and I54H. In some embodiments, the AAVR, or fragment or derivative thereof, comprises an amino acid sequence of any one of SEQ ID NO: 76-86.

[0182] In some embodiments, the AAVR, or fragment or derivative thereof, comprises SEQ ID NO: 29 with an additional five amino acids at the N-terminus having an amino acid sequence of GNRPP (SEQ ID NO: 89), and an additional five amino acids at the C-terminus having an amino acid sequence of VDYPG (SEQ ID NO: 90). In some embodiments, the AAVR, or fragment or derivative thereof, comprises an amino acid sequence of SEQ ID NO: 52. In some embodiments, the AAVR, or fragment or derivative thereof, comprises SEQ ID NO: 29 with at least one, at least two, at least three, at least four, or at least five mutations, wherein each mutation is individually selected from the group consisting of S23H, Q24H, T26H, D29H, K30H, I31H, V32H, Y34H, and 154H and an additional five amino acids at the N-terminus having an amino acid sequence of GNRPP (SEQ ID NO: 89), and an additional five amino acids at the C-terminus having an amino acid sequence of VDYPG (SEQ ID NO: 90). In some embodiments, the AAVR, or fragment or derivative thereof, comprises SEQ ID NO: 52 with at least one, at least two, at least three, at least four, or at least five mutations, wherein each mutation is individually selected from the group consisting of S23H, Q24H, T26H, D29H, K30H, I31H, V32H, Y34H, and I54H.

[0183] In some embodiments, the AAVR, or fragment or derivative thereof, is encoded by a nucleic acid sequence of any one of SEQ ID NO: 93-116. In some embodiments, the AAVR, or fragment or derivative thereof, comprises SEQ ID NO: 29 with V32H and V34H mutations and an additional five amino acids at the N-terminus having an amino acid sequence of GNRPP (SEQ ID NO: 89), and an additional five amino acids at the C-terminus having an amino acid sequence of VDYPG (SEQ ID NO: 90). In some embodiments, the AAVR, or fragment or derivative thereof, comprises SEQ ID NO: 29 with S23H and Q24H mutations and an additional five amino acids at the N-terminus having an amino acid sequence of GNRPP (SEQ ID NO: 89), and an additional five amino acids at the C-terminus having an amino acid sequence of VDYPG (SEQ ID NO: 90). In some embodiments, the AAVR, or fragment or derivative thereof, comprising SEQ ID NO: 29 with at least one, at least two, at least three, at least four, or at least five mutations, wherein each mutation is individually selected from the group consisting of S23H, Q24H, T26H, D29H, K30H, I31H, V32H, Y34H, and 154H and an additional five amino acids at the N-terminus having an amino acid sequence of GNRPP (SEQ ID NO: 89), and an additional five amino acids at the C-terminus having an amino acid sequence of VDYPG (SEQ ID NO: 90). In some embodiments, the AAVR, or fragment or derivative thereof, comprises an amino acid sequence of any one of SEQ ID NOs: 53-63.

[0184] In some embodiments, the AAVR, or fragment or derivative thereof, comprises an amino acid sequence of SEQ ID NO: 29, plus an additional five amino acids at the N-terminus having an amino acid sequence of GNRPP (SEQ ID NO: 89), and an additional four amino acids at the C-terminus having an amino acid sequence of VDYP (SEQ ID NO: 91). In some embodiments, the AAVR, or fragment or derivative thereof, comprises an amino acid sequence of SEQ ID NO: 64. In some embodiments, the AAVR, or fragment or derivative thereof, comprises an amino acid sequence of SEQ ID NO: 29 with at least one, at least two, at least three, at least four, or at least five mutations, wherein each mutation is individually selected from the group consisting of S23H, Q24H, T26H, D29H, K30H, I31H, V32H, Y34H, and 154H, and an additional five amino acids at the N-terminus having an amino acid sequence of GNRPP (SEQ ID NO: 89), and an additional four amino acids at the C-terminus having an amino acid sequence of VDYP (SEQ ID NO: 91). In some embodiments, the AAVR, or fragment or derivative thereof, comprises SEQ ID NO: 29 plus V32H and V34H mutations and an additional five amino acids at the N-terminus having an amino acid sequence of GNRPP (SEQ ID NO: 89), and an additional four amino acids at the C-terminus having an amino acid sequence of VDYP (SEQ ID NO: 91). In some embodiments, the AAVR, or fragment or derivative thereof, comprises SEQ ID NO: 29 with S23H and Q24H mutations and an additional five amino acids at the N-terminus having an amino acid sequence of GNRPP (SEQ ID NO: 89), and an additional four amino acids at the C-terminus having an amino acid sequence of VDYP (SEQ ID NO: 91). In some embodiments, the AAVR, or fragment or derivative thereof, comprises an amino acid sequence of SEQ ID NO: 29 with at least one, at least two, at least three, at least four, or at least five mutations, wherein each mutation is individually selected from the group consisting of S23H, Q24H, T26H, D29H, K30H, I31H, V32H, Y34H, and I54H and an additional five amino acids at the N-terminus having an amino acid sequence of GNRPP (SEQ ID NO: 89), and an additional four amino acids at the C-terminus having an amino acid sequence of VDYP (SEQ ID NO: 91). In some embodiments, the AAVR, or fragment or derivative thereof, comprises an amino acid sequence of any one of SEQ ID NOS: 65-75.

[0185] In some embodiments, the AAVR, or fragment or derivative thereof, described herein comprise one or more MANEC motifs (See, e.g., SEQ ID NOS: 49-51). In some embodiments, the AAVR, or fragment or derivative thereof, described herein comprise one or more recombinant MANEC motifs. In some embodiments, the AAVR, or fragment or derivative thereof, described herein comprise an amino acid sequence with at least about 80%, at least about 90%, at least about 95, or at least about 95% identity to a wild type MANEC motif. In some embodiments, the AAVR, or fragment or derivative thereof, comprise a MANEC motif having at least about 80%, at least about 90% or at least about 95% identity to any one of SEQ ID NOs: 49-51. In some embodiments, the AAVR, or fragment or derivative thereof, binds to AAV particles via one or more MANEC motifs.

[0186] In some embodiments, the AAVR, or fragment or derivative thereof, described herein comprises an N-terminal methionine. In some embodiments, the N-terminal methionine initiates translation of the AAVR, or fragment or derivative thereof, described herein. In some embodiments, the AAVR, or fragment or derivative thereof, described herein lacks an N-terminal methionine.

[0187] In some embodiments, the AAVR, or fragment or derivative thereof, described herein binds to AAV particles of the following serotypes: AAV1, AAV2, AAV3, AAV4, AAV5, AAV6, AAV7, AAV8, AAV9, AAV10, AAV11, AAV12, AAVrh8, AAVrh10, and/or AAVrh74. In some embodiments, the AAVR, or fragment or derivative thereof, binds to AAV particles of one or more of the following serotypes: AAV1, AAV2, AAV3B, AAV5, AAV6, AAV8, and AAV9. In some embodiments, the AAVR, or fragment or derivative thereof, binds to AAV1 particles. In some embodiments, the AAVR, or fragment or derivative thereof, binds to AAV2 particles. In some embodiments, the AAVR, or fragment or derivative thereof, binds to AAV3B particles. In some embodiments, the AAVR, or fragment or derivative thereof, binds to AAV5 particles. In some embodiments, the AAVR, or fragment or derivative thereof, binds to AAV6 particles. In some embodiments, the AAVR, or fragment or derivative thereof, binds to AAV8 particles. In some embodiments, the AAVR, or fragment or derivative thereof, binds to AAV9 particles.

[0188] In some embodiments, the AAVR is the human AAVR. In some embodiments, the AAVR is a primate AAVR. In some embodiments, the AAVR is a wildtype AAVR. In some embodiments, the AAVR is a mutant AAVR.

[0189] In some embodiments, the AAVR is a glycoprotein. In some embodiments, the AAVR, or fragment or derivative thereof, described herein comprises one or more glycosylation sites. In some embodiments, the AAVR, or fragment or derivative thereof, comprises O-linked glycosylation sites. In some embodiments, the AAVR, or fragment or derivative thereof, comprises N-linked glycosylation sites. In some embodiments, the AAVR, or fragment or derivative thereof, is glycosylated at one or more asparagine and/or glutamine residues.

[0190] In some embodiments, a fusion protein comprises from about 1 to about 100 AAVR, or fragment or derivative thereof. In some embodiments, the number of AAVR, or fragment or derivative thereof within a fusion protein is about 1, about 5, about 10, about 20, about 30, about 40, about 50, about 55, about 60, about 65, about 70, about 75, about 80, about 85, about 90, about 95, or about 100. In some embodiments, a single second polypeptide with phase behavior may be coupled to multiple AAVR, or fragment or derivative thereof, such as about 1 to about 100 AAVR, or fragment or derivative thereof.

[0191] In some embodiments, the AAVR, or fragment or derivative thereof, comprises a sequence of any one of SEQ ID NOS: 28-34, 37-41, 43-47, and 52-86. In some embodiments wherein a single polypeptide with phase behavior is coupled to multiple AAVR, or fragment or derivative thereof, each AAVR, or fragment or derivative thereof may be independently selected from SEQ ID NOS: 28-34, 37-41, 43-47, and 52-86.

[0192] In some embodiments, the first polypeptide is a polypeptide isolated or derived from SARS-COV-2. In some embodiments, the polypeptide isolated or derived from SARS-COV-2 is the spike, membrane, envelope, or nucleocapsid protein. In some embodiments, the first polypeptide is the SARS-COV-2 spike protein, or a fragment or derivative thereof. The SARS-CoV-2 spike protein (see, e.g. Uniprot Accession No. P0DTC2) mediates fusion of the virion to the cell membrane of a host via human angiotensin converting enzyme 2 (ACE2). An exemplary sequence of a SARS-COV-2 S protein is: MFVFLVLLPLVSSQCVNLTTRTQLPPAYTNSFTRGVYYPDKVFRSSVLHSTQDLFLPFFS NVTWFHAIHVSGTNGTKRFDNPVLPFNDGVYFASTEKSNIIRGWIFGTTLDSKTQSLLIV NNATNVVIKVCEFQFCNDPFLGVYYHKNNKSWMESEFRVYSSANNCTFEYVSQPFLMD LEGKQGNFKNLREFVFKNIDGYFKIYSKHTPINL VRDLPQGFSALEPLVDLPIGINITRFQT LLALHRSYLTPGDSSSGWTAGAAAYYVGYLQPRTFLLKYNENGTITDAVDCALDPLSET KCTLKSFTVEKGIYQTSNFR VQPTESIVRFPNITNLCPFGEVFNATRFASVYAWNRKRISN CVADYSVLYNSASFSTFKCYGVSPTKLNDLCFTNVYADSFVIRGDEVRQIAPGQTGKIA DYNYKLPDDFTGCVIAWNSNNLDSKVGGNYNYLYRLFRKSNLKPFERDISTEIYQAGST PCNGVEGENCYFPLQSYGFQPTNGVGYQPYRVVVLSFELLHAPATVCGPKKSTNLVKN KCVNFNFNGLTGTGVLTESNKKFLPFQQFGRDIADTTDAVRDPQTLEILDITPCSFGGVS VITPGTNTSNQVAVLYQDVNCTEVPVAIHADQLTPTWRVYSTGSNVFQTRAGCLIGAEH VNNSYECDIPIGAGICASYQTQTNSPRRARSVASQSIIAYTMSLGAENSVAYSNNSIAIPT NFTISVTTEILPVSMTKTSVDCTMYICGDSTECSNLLLQYGSFCTQLNRALTGIA VEQDK NTQEVFAQVKQIYKTPPIKDFGGFNFSQILPDPSKPSKRSFIEDLLFNKVTLADAGFIKQY GDCLGDIAARDLICAQKFNGLTVLPPLLTDEMIAQYTSALLAGTITSGWTFGAGAALQIP FAMQMAYRFNGIGVTQNVLYENQKLIANQFNSAIGKIQDSLSSTASALGKLQDVVNQN AQALNTLVKQLSSNFGAISSVLNDILSRLDK VEAEVQIDRLITGRLQSLQTYVTQQLIRAA EIRASANLAATKMSECVLGQSKRVDFCGKGYHLMSFPQSAPHGVVFLHVTYVPAQEKN FTTAPAICHDGKAHFPREGVFVSNGTHWFVTQRNFYEPQIITTDNTFVSGNCDVVIGIVN NTVYDPLQPELDSFKEELDKYFKNHTSPDVDLGDISGINASVVNIQKEIDRLNEVAKNLN ESLIDLQELGKYEQYIKWPWYIWLGFIAGLIAIVMVTIMLCCMTSCCSCLKGCCSCGSCC KFDEDDSEPVLKGVKLHYT (SEQ ID NO: 27). In some embodiments, the first polypeptide is a SARS-COV-2 S protein having an amino acid sequence of SEQ ID NO: 27 or about 95%, about 96%, about 97%, about 98%, or about 99% identity to SEQ ID NO: 27.

### Second Polypeptide

[0193] In some embodiments, the disclosure provides a fusion protein comprising a polypeptide that has phase behavior.

[0194] In some embodiments, the polypeptide with phase behavior is a resilin-like polypeptide (RLP). Resilin-like polypeptides are elastomeric polypeptides with mechanical properties including desirable resilience, compressive elastic modulus, tensile elastic modulus, shear modulus, extension to break, maximum tensile strength, hardness, rebound, and compression set. In some embodiments, the resilin-like polypeptides described herein are polymers which comprise one or more repeats. In some embodiments, the polymeric repeats may have an amino acid sequence selected from any one of SEQ ID NOS: 1-9.

[0195] In some embodiments, a resilin-like polypeptide comprises more than one type of repeat, e.g. a repeat of SEQ ID NO: 1 and a repeat of SEQ ID NO: 3.

[0196] In some embodiments, the resilin-like polypeptides described herein comprise repeats that occur up to 500 times within a given RLP. In some embodiments, the repeats occur about 1, about 2, about 3, about 4, about 5, about 6, about 7, about 8, about 9, about 10, about 20, about 30, about 40, about 50, about 60, about 70, about 80, about 90, about 100, about 110, about 120, about 130, about 140, about 150, about 160, about 170, about 180, about 190, about 200, about 210, about 220, about 230, about 240, about 250, about 260, about 270, about 280, about 290, about 300, about 310, about 320, about 330, about 340, about 350, about 360, about 370, about 380, about 390, about 400, about 450, or about 500 times.

[0197] In some embodiments, the RLP comprises one or more partial repeats. In some embodiments, the length of a partial repeat is 1, 2, 3, 4, 5, 6, 7, 8, 9, or 10 amino acids. In some embodiments, the RLP comprises one or more additional amino acids at the N-terminus or C-terminus of the RLP that are not part of a repeat.

[0198] In some embodiments, one or more RLP repeats are scrambled, i.e., they contain a different amino acid sequence but retain the same amino acid composition. For example, a repeat may have a different amino acid sequence than SEQ ID NO: 8, but retain the same amino acid composition.

[0199] In some embodiments, the polypeptide with phase behavior is an elastin-like polypeptide. Elastin-like polypeptides (ELPs) are biopolymers derived from tropoelastin. In some embodiments, the elastin-like polypeptides described herein are polymers comprising a pentapeptide repeat having the sequence (Val-Pro-Gly-Xaa-Gly)ₙ (SEQ ID NO: 10), wherein Xaa is defined herein.

[0200] In some embodiments, n is 1, 2, 3, 4, 5, 6, 7, 8, 9, 10, 11, 12, 13, 14, 15, 16, 17, 18, 19, 20, 21, 22, 23, 24, 25, 26, 27, 28, 29, 30, 31, 32, 33, 34, 35, 36, 37, 38, 39, 40, 41, 42, 43, 44, 45, 46, 47, 48, 49, 50, 51, 52, 53, 54, 55, 56, 57, 58, 59, 60, 61, 62, 63, 64, 65, 66, 67, 68, 69, 70, 71, 72, 73, 74, 75, 76, 77, 78, 79, 80, 81, 82, 83, 84, 85, 86, 87, 88, 89, 90, 91, 92, 93, 94, 95, 96, 97, 98, 99, 100, 101, 102, 103, 104, 105, 106, 107, 108, 109, 110, 111, 112, 113, 114, 115, 116, 117, 118, 119, 120, 121, 122, 123, 124, 125, 126, 127, 128, 129, 130, 131, 132, 133, 134, 135, 136, 137, 138, 139, 140, 141, 142, 143, 144, 145, 146, 147, 148, 149, 150, 160, 170, 180, 190, 200, 210, 220, 230, 240, 250, 260, 270, 280, 290, 300, 310, 320, 330, 340, 350, 360, 370, 380, 390, 400, 410, 420, 430, 440, 450, 460, 470, 480, 490, or 500, including all values and ranges in between.

[0201] In some embodiments, the pentapeptide repeat is scrambled, for example it comprises a different amino acid sequence but maintains the same amino acid composition. For example, an ELP may comprise a different amino acid sequence than SEQ ID NO: 10, but maintains the same amino acid composition, e.g. 40% of the sequence is glycine, 20% of the sequence is Xaa (e.g., any amino acid except proline), 20% of the sequence is proline, and 20% of the sequence is valine.

[0202] In some embodiments, the ELP comprises one or more partial repeats. In some embodiments, the length of a partial repeat is 1, 2, 3, or 4 amino acids. In some embodiments, the ELP comprises one or more additional amino acids at the N-terminus or C-terminus of the ELP that are not part of a repeat.

[0203] In some embodiments, an ELP or RLP comprises from 30 to about 150 amino acids. In some embodiments, an ELP or RLP comprises from about 50 to about 100 amino acids. In embodiments, the ELP or RLP comprises about 30, about 31, about 32, about 33, about 34, about 35, about 36, about 37, about 38, about 39, about 40, about 41, about 42, about 43, about 44, about 45, about 46, about 47, about 48, about 49, about 50, about 51, about 52, about 53, about 54, about 55, about 56, about 57, about 58, about 59, about 60, about 61, about 62, about 63, about 64, about 65, about 66, about 67, about 68, about 69, about 70, about 71, about 72, about 73, about 74, about 75, about 76, about 77, about 78, about 79, about 80, about 81, about 82, about 83, about 84, about 85, about 86, about 87, about 88, about 89, about 90, about 91, about 92, about 93, about 94, about 95, about 96, about 97, about 98, about 99, about 100, about 101, about 102, about 103, about 104, about 105, about 106, about 107, about 108, about 109, about 110, about 111, about 112, about 113, about 114, about 115, about 116, about 117, about 118, about 119, about 120, about 121, about 122, about 123, about 124, about 125, about 126, about 127, about 128, about 129, about 130, about 131, about 132, about 133, about 134, about 135, about 136, about 137, about 138, about 139, about 140, about 141, about 142, about 143, about 144, about 145, about 146, about 147, about 148, about 149, or about 150 amino acids. In embodiments, the ELP or RLP comprises at least about 30, at least about 31, at least about 32, at least about 33, at least about 34, at least about 35, at least about 36, at least about 37, at least about 38, at least about 39, at least about 40, at least about 41, at least about 42, at least about 43, at least about 44, at least about 45, at least about 46, at least about 47, at least about 48, at least about 49, at least about 50, at least about 51, at least about 52, at least about 53, at least about 54, at least about 55, at least about 56, at least about 57, at least about 58, at least about 59, at least about 60, at least about 61, at least about 62, at least about 63, at least about 64, at least about 65, at least about 66, at least about 67, at least about 68, at least about 69, at least about 70, at least about 71, at least about 72, at least about 73, at least about 74, at least about 75, at least about 76, at least about 77, at least about 78, at least about 79, at least about 80, at least about 81, at least about 82, at least about 83, at least about 84, at least about 85, at least about 86, at least about 87, at least about 88, at least about 89, at least about 90, at least about 91, at least about 92, at least about 93, at least about 94, at least about 95, at least about 96, at least about 97, at least about 98, at least about 99, at least about 100, at least about 101, at least about 102, at least about 103, at least about 104, at least about 105, at least about 106, at least about 107, at least about 108, at least about 109, at least about 110, at least about 111, at least about 112, at least about 113, at least about 114, at least about 115, at least about 116, at least about 117, at least about 118, at least about 119, at least about 120, at least about 121, at least about 122, at least about 123, at least about 124, at least about 125, at least about 126, at least about 127, at least about 128, at least about 129, at least about 130, at least about 131, at least about 132, at least about 133, at least about 134, at least about 135, at least about 136, at least about 137, at least about 138, at least about 139, at least about 140, at least about 141, at least about 142, at least about 143, at least about 144, at least about 145, at least about 146, at least about 147, at least about 148, at least about 149, or at least about 150 amino acids. In embodiments, the polypeptide with phase behavior may comprise any 30 to 150 amino acid fragment or any 50 to 100 amino acid fragment of an ELP or RLP described herein.

[0204] ELPs and RLPs undergo a phase transition in response to an environmental factor. ELPs and RLPs retain their ability to undergo a phase transition when coupled to one or more polypeptides (such as one or more AAV binding polypeptides), or expressed as a fusion protein with one or more other polypeptides (such as one or more AAV binding polypeptides). Polymers like ELPs and RLPs exhibit a transition temperature (Tₜ), also referred to as a cloud point temperature (Tc). In some embodiments ELPs and RLPs undergo a reversible phase transition from a soluble to an insoluble phase at the Tₜ. ELPs that transition from a soluble to an insoluble phase with heating or an increase in salt concentration have a Tₜ referred to as a lower critical solution temperature (LCST). RLPs that transition from a soluble to an insoluble phase with cooling or a decrease in salt concentration have a Tₜ referred to as a lower critical solution temperature (UCST). In some embodiments, the phase transition results from a change in secondary structure of the ELP and/or RLP. For example, the phase transition of an ELP results from a change in secondary structure from a random coil (below the Tₜ) to a type II β-turn. In some embodiments, the change in secondary structure is characterized by a method selected from circular dichroism spectropolarimetry, small angle x-ray scattering, ultraviolet-visible spectrophotometry, static light scattering, dynamic light scattering, nuclear magnetic resonance spectroscopy, solid-state nuclear magnetic resonance spectroscopy, infrared spectroscopy, Fourier transform infrared spectroscopy (FTIR), small angle neutron scattering, microscopy, and cryo-electron microscopy. In some embodiments, the phase transition of an ELP does not result from a change in secondary structure.

[0205] In some embodiments, the RLPs and ELPs described herein have a transition temperature between about 0° C. and about 100° C. In some embodiments, the RLPs and/or ELPs described herein have a transition temperature between about 10° C. and about 50° C. In some embodiments the transition temperature is about 0° C., about 1° C., about 2° C., about 3° C., about 4° C., about 5° C., about 6° C., about 7° C., about 8° C., about 9° C., about 10° C., about 11° C., about 12° C., about 13° C., about 14° C., about 15° C., about 16° C., about 17° C., about 18° C., about 19° C., about 20° C., about 21° C., about 22° C., about 23° C., about 24° C., about 25° C., about 26° C., about 27° C., about 28° C., about 29° C., about 30° C., about 31° C., about 32° C., about 33° C., about 34° C., about 35° C., about 36° C., about 37° C., about 38° C., about 39° C., about 40° C., about 41° C., about 42° C., about 43° C., about 44° C., about 45° C., about 46° C., about 47° C., about 48° C., about 49° C., about 50° C., about 51° C., about 52° C., about 53° C., about 54° C., about 55° C., about 56° C., about 57° C., about 58° C., about 59° C., about 60° C., about 61° C., about 62° C., about 63° C., about 64° C., about 65° C., about 66° C., about 67° C., about 68° C., about 69° C., about 70° C., about 71° C., about 72° C., about 73° C., about 74° C., about 75° C., about 76° C., about 77° C., about 78° C., about 79° C., about 80° C., about 81° C., about 82° C., about 83° C., about 84° C., about 85° C., about 86° C., about 87° C., about 88° C., about 89° C., about 90° C., about 91° C., about 92° C., about 93° C., about 94° C., about 95° C., about 96° C., about 97° C., about 98° C., about 99° C., or about 100° C. In some embodiments the transition temperature is at least about 0° C., at least about 1° C., at least about 2° C., at least about 3° C., at least about 4° C., at least about 5° C., at least about 6° C., at least about 7° C., at least about 8° C., at least about 9° C., at least about 10° C., at least about 11° C., at least about 12° C., at least about 13° C., at least about 14° C., at least about 15° C., at least about 16° C., at least about 17° C., at least about 18° C., at least about 19° C., at least about 20° C., at least about 21° C., at least about 22° C., at least about 23° C., at least about 24° C., at least about 25° C., at least about 26° C., at least about 27° C., at least about 28° C., at least about 29° C., at least about 30° C., at least about 31° C., at least about 32° C., at least about 33° C., at least about 34° C., at least about 35° C., at least about 36° C., at least about 37° C., at least about 38° C., at least about 39° C., at least about 40° C., at least about 41° C., at least about 42° C., at least about 43° C., at least about 44° C., at least about 45° C., at least about 46° C., at least about 47° C., at least about 48° C., at least about 49° C., at least about 50° C., at least about 51° C., at least about 52° C., at least about 53° C., at least about 54° C., at least about 55° C., at least about 56° C., at least about 57° C., at least about 58° C., at least about 59° C., at least about 60° C., at least about 61° C., at least about 62° C., at least about 63° C., at least about 64° C., at least about 65° C., at least about 66° C., at least about 67° C., at least about 68° C., at least about 69° C., at least about 70° C., at least about 71° C., at least about 72° C., at least about 73° C., at least about 74° C., at least about 75° C., at least about 76° C., at least about 77° C., at least about 78° C., at least about 79° C., at least about 80° C., at least about 81° C., at least about 82° C., at least about 83° C., at least about 84° C., at least about 85° C., at least about 86° C., at least about 87° C., at least about 88° C., at least about 89° C., at least about 90° C., at least about 91° C., at least about 92° C., at least about 93° C., at least about 94° C., at least about 95° C., at least about 96° C., at least about 97° C., at least about 98° C., at least about 99° C., or at least about 100° C. In some embodiments, the RLPs described herein have a transition temperature from about 10° C. to about 100° C.

[0206] In some embodiments, the Tₜ of the RLPs and ELPs described herein is modulated by manipulating the primary structure (e.g. amino acid sequence) of the RLP and ELP. In some embodiments, the hydrophobicity of the ELP or RLP is modulated. In some embodiments, the hydrophobicity of the ELP is modified by altering the identity of the guest residue Xaa. In some embodiments, the hydrophobicity of the ELP or RLP is increased resulting in a decreased Tₜ. In some embodiments, the hydrophobicity of the ELP or RLP is decreased resulting in an increased Tₜ. In some embodiments, the polarity of the ELP or RLP is modulated. In some embodiments, the polarity of the ELP is modulated by altering the identity of the guest residue Xaa. In some embodiments, the polarity of the ELP or RLP is increased resulting in an increased Tₜ. In some embodiments, the polarity of the ELP or RLP is decreased resulting in a decreased Tₜ.

[0207] In some embodiments, the number of ELP pentapeptide repeats (n) is modulated to alter the Tₜ. In some embodiments, n of the pentapeptide repeat (Val-Pro-Gly-Xaa-Gly)ₙ (SEQ ID NO: 10) is an integer from 1 to 500, inclusive of endpoints. In some embodiments, n is 1, 2, 3, 4, 5, 6, 7, 8, 9, 10, 11, 12, 13, 14, 15, 16, 17, 18, 19, 20, 21, 22, 23, 24, 25, 26, 27, 28, 29, 30, 31, 32, 33, 34, 35, 36, 37, 38, 39, 40, 41, 42, 43, 44, 45, 46, 47, 48, 49, 50, 51, 52, 53, 54, 55, 56, 57, 58, 59, 60, 61, 62, 63, 64, 65, 66, 67, 68, 69, 70, 71, 72, 73, 74, 75, 76, 77, 78, 79, 80, 81, 82, 83, 84, 85, 86, 87, 88, 89, 90, 91, 92, 93, 94, 95, 96, 97, 98, 99, 100, 101, 102, 103, 104, 105, 106, 107, 108, 109, 110, 111, 112, 113, 114, 115, 116, 117, 118, 119, 120, 121, 122, 123, 124, 125, 126, 127, 128, 129, 130, 131, 132, 133, 134, 135, 136, 137, 138, 139, 140, 141, 142, 143, 144, 145, 146, 147, 148, 149, 150, 160, 170, 180, 190, 200, 210, 220, 230, 240, 250, 260, 270, 280, 290, 300, 310, 320, 330, 340, 350, 360, 370, 380, 390, 400, 410, 420, 430, 440, 450, 460, 470, 480, 490, or 500, including all values and ranges in between.

[0208] In some embodiments, Xaa is a “guest residue,” i.e., any amino acid that does not eliminate the phase behavior of the ELP. In some embodiments, Xaa is any amino acid except proline. In some embodiments, Xaa is independently selected for each repeat. For example, a given ELP may comprise the guest residues alanine, glycine, and valine at a ratio of 8:7:1. In some embodiments Xaa is selected from the group consisting of alanine, arginine, asparagine, aspartic acid, cysteine, glutamic acid, glutamine, glycine, histidine, isoleucine, leucine, lysine, methionine, phenylalanine, praline, serine, threonine, tryptophan, tyrosine and valine. In some embodiments, Xaa is a non-classical amino acid selected from Table 2 and/or the group consisting of 2,4-diaminobutyric acid, α-amino-isobutyric acid, alloisoleucine, 4-aminobutyric acid, 2-amino butyric acid (Abu), ε-Ahx, 6-amino hexanoic acid, 2-amino isobutyric acid (Aib), 3-amino propionic acid, ornithine, norleucine, norvaline, hydroxyproline, sarcosine, citrulline, homocitrulline, cysteic acid, t-butylglycine, t-butylalanine, phenylglycine, cyclohexylalanine, β-alanine, fluoro-amino acids, designer amino acids such as β-methyl amino acids, Cα-methyl amino acids, Na-methyl amino acids, and amino acid analogs in general. In some embodiments, Xaa is the D-isomer of a natural or non-classical amino acid.

[0209] In some embodiments, the Tₜ of the RLPs and ELPs described herein is modulated by introducing one or more environmental factors to the composition comprising the RLP and/or ELP. In some embodiments, the Tₜ of the ELPs and/or RLPs is modulated by adjusting the ionic strength of solvents. In some embodiments, the ionic strength of the solvent is adjusted by adding salt. In some embodiments, ELPs and/or RLPs comprise lower Tₜ in solvents comprising anions categorized as kosmotropes. Anions that are kosmotropes are highly hydrated and influence the water shield on ELPs and/or RLPs. In some embodiments, the Tₜ of ELPs and/or RLPs can be adjusted through the addition of anions that are chaotropes. At low concentrations, the addition of chaotropes increase the Tₜ of the ELP and/or RLP. At high concentrations, the addition of a chaotrope decreases the Tₜ of the ELP and/or RLP. In some embodiments, the Tₜ of the ELP and/or RLP can be tuned by introducing one or more reagents that disrupts hydrogen bonds. Non-limiting examples of reagents that disrupt hydrogen bonds include sodium dodecyl sulfate (SDS) and urea. In some embodiments, reagents that enhance hydrogen bond formation are utilized to modulate the Tₜ. In some embodiments, reagents that enhance hydrophobic interactions are utilized to modulate the Tₜ. Trifluoroethanol is a reagent which enhances both hydrophobic interactions and hydrogen bond formation, causing a decrease in Tₜ.

[0210] In some embodiments, the ELP and/or RLP concentration can be adjusted to modulate Tₜ. In some embodiments, a higher ELP and/or RLP concentration results in a reduced Tₜ. In some embodiments, a lower ELP and/or RLP concentration results in an increased Tₜ.

[0211] In addition, modulation of pH, light, and ion concentrations also can be utilized to modulate Tₜ.

[0212] In some embodiments, modulation of the number of (e.g. addition or removal) charged amino acids (e.g. histidine, lysine, arginine, glutamic acid, aspartic acid, ornithine, or other non-natural charged amino acids) and identity (e.g. positively or negatively charged) enables tuning of the Tₜ through pH modulation.

[0213] In some embodiments, the ELPs and/or RLPs described herein are block copolymers. A block copolymer comprises two or more sequence domains or blocks, in which two or more blocks comprise different properties. Non-limiting examples of properties that can be tuned include hydrophilicity, hydrophobicity, polarity, and secondary structure. In some embodiments, the block copolymer is an amphiphile, e.g. it comprises at least one hydrophobic and at least one hydrophilic block.

[0214] In some embodiments, the ELPs and/or RLPs described herein assemble into various morphologies. Non-limiting examples of morphologies include a spherical aggregate, a micelle, a vesicle, a fibril, a nanofibril, a nanotube, and a hydrogel. In some embodiments, the RLPs and/or ELPs described herein assemble into various morphologies after the addition of an environmental factor. In some embodiments, the RLPs and/or ELPs described herein change from one morphology to another morphology after the addition of an environmental factor. In some embodiments, the RLPs and/or ELPs described herein change from one morphology to another morphology after the addition of an AAV particle.

[0215] In some embodiments, addition of an environmental factor causes an RLP and/or ELP to undergo a phase transition. In some embodiments, at the RLP and/or ELP phase transition, the RLP and/or ELP converts from one morphology to another morphology.

[0216] In some embodiments, a phase transition of an RLP and/or ELP causes the formation of dense, liquid, droplets.

[0217] In some embodiments, the polypeptide with phase behavior comprises an amino acid sequence selected from the group consisting of:

(a)
(SEQ ID NO: 1)
(GRGDSPY)ₙ
(b)
(SEQ ID NO: 2)
(GRGDSPH)ₙ
(c)
(SEQ ID NO: 3)
(GRGDSPV)ₙ
(d)
(SEQ ID NO: 4)
(GRGDSPYG)ₙ
(e)
(SEQ ID NO: 5)
(RPLGYDS)ₙ
(f)
(SEQ ID NO: 6)
(RPAGYDS)ₙ
(g)
(SEQ ID NO: 7)
(GRGDSYP)ₙ
(h)
(SEQ ID NO: 8)
(GRGDSPYQ)ₙ
(i)
(SEQ ID NO: 9)
(GRGNSPYG)ₙ
(j)
(SEQ ID NO: 11)
(GVGVP)ₙ;
(k)
(SEQ ID NO: 12)
(GVGVPGLGVPGVGVPGLGVPGVGVP)ₘ;
(l)
(SEQ ID NO: 13)
(GVGVPGVGVPGAGVPGVGVPGVGVP)ₘ;
(m)
(SEQ ID NO: 14)
(GVGVPGWGVPGVGVPGWGVPGVGVP)ₘ;
(n)
(SEQ ID NO: 15)
(GVGVPGVGVPGVGVPGVGVPGVGVPGV
GVPGEGVPGFGVPGVGVP)ₘ;
(o)
(SEQ ID NO: 16)
(GVGVPGVGVPGVGVPGVGVPGVGVPGVG
VPGKGVPGFGVPGVGVP)ₘ;
and
(p)
(SEQ ID NO: 17)
(GAGVPGVGVPGAGVPGVGVPGAGVP)ₘ;

[0218] or a randomized, scrambled analog thereof;
[0219] wherein:
[0220] n is an integer in the range of 1-500, inclusive of endpoints; and
[0221] m is an integer in the range of 4-25, inclusive of endpoints.

[0222] In some embodiments, the polypeptide with phase behavior is (GVGVPGLGVPGVGVPGLGVPGVGVP)ₘ (SEQ ID NO: 12), wherein m is 16. In some embodiments, the polypeptide with phase behavior comprises an amino acid sequence of (GVGVPGLGVPGVGVPGLGVPGVGVP)ₘ (SEQ ID NO: 12), wherein m is 16, and up to 10 additional amino acids at the N-terminus or C-terminus. In some embodiments, the polypeptide with phase behavior comprises an amino acid sequence of (GVGVPGLGVPGVGVPGLGVPGVGVP)ₘ (SEQ ID NO: 12), wherein m is 16, and an additional C-terminal glycine. In some embodiments, the polypeptide with phase behavior comprises an amino acid sequence of (GVGVPGLGVPGVGVPGLGVPGVGVP)ₘ (SEQ ID NO: 12), wherein m is 16, and an additional N-terminal methionine. In some embodiments, the polypeptide with phase behavior comprises an amino acid sequence of (GVGVPGLGVPGVGVPGLGVPGVGVP)ₘ (SEQ ID NO: 12), wherein m is 16, and an additional C-terminal glycine and an additional N-terminal methionine.

[0223] In some embodiments, the polypeptide with phase behavior has an amino acid sequence of SEQ ID NO: 88.

[0224] In some embodiments, the polypeptide with phase behavior comprises an amino acid sequence of (GVGVPGVGVPGAGVPGVGVPGVGVP)ₘ (SEQ ID NO: 144) or (GVGVPGVGVPGLGVPGVGVPGVGVP)ₘ (SEQ ID NO: 146), wherein m is an integer between 2 and 32, inclusive of endpoints. In some embodiments, the polypeptide with phase behavior comprises an amino acid sequence of (GVGVPGVGVPGAGVPGVGVPGVGVP)ₘ (SEQ ID NO: 144), wherein m is 8 or 16. In some embodiments, the polypeptide with phase behavior comprises an amino acid sequence of (GVGVPGAGVP)ₘ (SEQ ID NO: 145), wherein m is an integer between 5 and 80, inclusive of endpoints. In some embodiments, the polypeptide with phase behavior comprises an amino acid sequence of (GXGVP)ₘ (SEQ ID NO: 147), wherein m is an integer between 10 and 160, inclusive of endpoints, and wherein X for each repeat is independently selected from the group consisting of glycine, alanine, valine, isoleucine, leucine, phenylalanine, tyrosine, tryptophan, lysine, arginine, aspartic acid, glutamic acid, and serine.

[0225] In some embodiments, the polypeptide with phase behavior comprises an amino acid sequence selected from

(a)
(SEQ ID NO: 143)
(GVGVP)ₘ;
(b)
(SEQ ID NO: 148)
(ZZPXXXXGZ)ₘ;
(c)
(SEQ ID NO: 149)
(ZZPXGZ)ₘ;
(d)
(SEQ ID NO: 150)
(ZZPXXGZ)ₘ;
or
(e)
(SEQ ID NO: 151)
(ZZPXXXGZ)ₘ,

wherein m is an integer between 10 and 160, inclusive of endpoints, wherein X if present is any amino acid except proline or glycine, and wherein Z if present is any amino acid.

[0226] In some embodiments, the polypeptide with phase behavior comprises an amino acid sequence of (GVGVP)ₘ (SEQ ID NO: 143), wherein m is 20, 40, or 80. In some embodiments, the polypeptide with phase behavior comprises an amino acid sequence of (GRGDXPZX)ₘ (SEQ ID NO: 152) or (XZPXDGRG)ₘ (SEQ ID NO: 153), wherein X is glutamine or serine, Z is tyrosine or valine, and m is an integer between 10 and 160, inclusive of endpoints.

[0227] In some embodiments, the polypeptide with phase behavior comprises a first set of repeat sequences and a second set of repeat sequences. The first set of repeat sequences and the second set of repeat sequences may each individually comprise sequences that are repeated one or more times. In some embodiments, the first set of repeat sequences any/or the second set of repeat sequences comprises a repeating sequence comprising any one of SEQ ID NOs: 1-17 and 143-153. In some embodiments, the polypeptide with phase behavior comprises a first set of repeat sequences and a second set of repeat sequences, wherein the first set of repeat sequences comprises the amino acid sequence of (GRGDXPZX)₄₀ (SEQ ID NO: 185) and the second set of repeat sequences comprises the amino acid sequence (GVGVP)₈₀ (SEQ ID NO: 186), wherein X is glutamine and Z is tyrosine. In some embodiments, the first set of repeat sequences comprises the sequence of SEQ ID NO: 187. In some embodiments, the polypeptide with phase behavior comprises at least one, at least two, at least three, at least four, at least five, at least six, at least seven, at least eight, at least nine, or at least ten different sets of repeat sequences. In some embodiments, each set of repeat sequences within the polypeptide with phase behavior comprises sequences that repeat from about 5 to about 400 times, for example, about 5, about 10, about 15, about 20, about 25, about 30, about 35, about 40, about 45, about 50, about 55, about 60, about 65, about 70, about 75, about 80, about 85, about 90, about 95, about 100, about 105, about 110, about 115, about 120, about 125, about 130, about 135, about 140, about 145, about 150, about 155, about 160, about 165, about 170, about 175, about 180, about 185, about 190, about 195, about 200, about 205, about 210, about 215, about 220, about 225, about 230, about 235, about 240, about 245, about 250, about 255, about 260, about 265, about 270, about 275, about 280, about 285, about 290, about 295, about 300, about 305, about 310, about 315, about 320, about 325, about 330, about 335, about 340, about 345, about 350, about 355, about 360, about 365, about 370, about 375, about 380, about 385, about 390, about 395, or about 400 times.

[0228] In some embodiments, the polypeptide with phase behavior comprising an amino acid sequence selected from any one of SEQ ID NOs: 1-17, 88, and 143-153 also comprises up to 10 additional N-terminal and/or C-terminal amino acids. In some embodiments, the polypeptide with phase behavior comprising an amino acid sequence of any one of SEQ ID NOs: 1-17, 88, and 143-153 also comprises an additional N-terminal methionine. In some embodiments, the polypeptide with phase behavior comprising an amino acid sequence of any one of SEQ ID NOs: 1-17, 88, and 143-153 also comprises an additional C-terminal glycine.

[0229] In some embodiments, the polypeptide with phase behavior has the same amino acid composition of an ELP and/or RLP but does not comprise repeats. In some embodiments, the polypeptide with phase behavior comprises an amino acid sequence that is about 80%, about 85%, about 90%, about 95%, about 96%, about 97%, about 98%, about 99%, or about 100% identical to an ELP and/or RLP. In some embodiments, the polypeptide with phase behavior comprises an amino acid composition that is about 80%, about 85%, about 90%, about 95%, about 96%, about 97%, about 98%, about 99%, or about 100% identical to an ELP and/or RLP. In some embodiments, the polypeptide with phase behavior comprises a composition of hydrophobic amino acids that is about 80%, about 85%, about 90%, about 95%, about 96%, about 97%, about 98%, about 99%, or about 100% identical to an ELP and/or RLP.

[0230] In some embodiments, the polypeptide with phase behavior comprises a non-repetitive unstructured polypeptide. In some embodiments, the non-repetitive unstructured polypeptide has an amino acid sequence that comprises at least 50 amino acids. In some embodiments, the non-repetitive unstructured polypeptide has an amino acid sequence that comprises at least 50, at least 60, at least 70, at least 80, at least 90, or at least 100 amino acids. In some embodiments, the sequence of the non-repetitive unstructured polypeptide is at least about 10% proline (e.g., at least 10%, at least 20%, at least 30%, at least 40%, at least 50%, at least 60%, at least 70%, or at least 80%) and at least 20% glycine (e.g. at least 20%, at least 30%, at least 40%, at least 50%, at least 60%, at least 70%, at least 80%, or at least 90%). In some embodiments, the non-repetitive unstructured polypeptide has a sequence that comprises at least about 40% of amino acids selected from the group consisting of valine, alanine, leucine, lysine, threonine, isoleucine, tyrosine, serine, and phenylalanine.

[0231] In some embodiments, the polypeptide with phase behavior comprises a sequence that does not comprise three contiguous identical amino acids, wherein any 5-10 amino acid subsequence does not occur more than once in the polypeptide with phase behavior, and wherein when the polypeptide with phase behavior comprises a subsequence starting and ending with proline, and wherein the subsequence further comprises at least one glycine.

[0232] The ELPs and/or RLPs described herein are expressed as a component of a fusion protein, e.g., the second polypeptide, wherein the second polypeptide has phase behavior. In some embodiments, a fusion protein comprises a first polypeptide. Examples of first polypeptides are provided throughout this example. In some embodiments, the first polypeptide is (i) an enzyme, or a derivative or catalytic fragment thereof; (ii) an antibody, or a derivative or antigen-binding fragment thereof; (iii) a signaling molecule, or a fragment or derivative thereof; (iv) a structural protein, or a fragment or derivative thereof; or (v) a hormone, or a fragment or derivative thereof.

[0233] In some embodiments, the fusion protein is expressed in bacteria or mammalian cells.

[0234] In some embodiments, the fusion protein is expressed in Escherichia coli. In some embodiments, the fusion protein is expressed in insect cells. In some embodiments, the sequence of the non-repetitive unstructured polypeptide is at least about 10% proline (e.g. at least 10%, at least 20%, at least 30%, at least 40%) and at least 20% glycine (e.g. at least 20%, at least 30%, at least 40%, or at least 50%), and at least 40% (e.g. at least 40%, at least 50%, at least 60%, or at least 70%) of amino acids selected from the group consisting of valine, alanine, leucine, lysine, threonine, isoleucine, tyrosine, serine, and phenylalanine.

[0235] In some embodiments, the polypeptide with phase behavior does not comprise three contiguous identical amino acids. In some embodiments, the polypeptide with phase behavior comprises a subsequence (e.g., a fragment of the polypeptide with phase behavior) which only occurs once in the amino acid sequence of the polypeptide with phase behavior. In some embodiments, the polypeptide with phase behavior comprises a subsequence that starts and ends with proline. In some embodiments, the polypeptide with phase behavior comprises a subsequence that comprises at least one glycine.

[0236] In some embodiments, the polypeptide with phase behavior comprises a signal peptide. In some embodiments, the polypeptide with phase behavior comprises an N-terminal methionine. In some embodiments, the polypeptide with phase behavior lacks an N-terminal methionine. As used herein, “(M)” refers to an optional N-terminal methionine.

### Linkers

[0237] In some embodiments, a linker separates the first polypeptide and the second polypeptide of the fusion protein. In some embodiments, any linker that does not interfere with the function of the fusion protein may be utilized. In some embodiments, the linker may be flexible. In some embodiments, the linker may be rigid.

[0238] In some embodiments, the linker preserves the phase behavior of the polypeptide with phase behavior. In some embodiments, the linker preserves the Tₜ of the polypeptide with phase behavior. In some embodiments, the linker preserves the structure of the first polypeptide. In some embodiments, the linker comprises between 1 and 50 amino acids. In some embodiments, the linker comprises about 1, 2, 3, 4, 5, 6, 7, 8, 9, 10, 11, 12, 13, 14, 15, 16, 17, 18, 19, 20, 21, 22, 23, 24, 25, 26, 27, 28, 29, 30, 31, 32, 33, 34, 35, 36, 37, 38, 39, 40, 41, 42, 43, 44, 45, 46, 47, 48, 49, or 50 amino acids.

[0239] In some embodiments, the stiffness of the linker is increased by the inclusion of proline in the linker amino acid sequence.

[0240] In some embodiments, the flexibility of a linker is increased by the inclusion of small polar amino acids, including threonine, serine, and glycine.

[0241] In some embodiments, the linker may adopt various secondary structures, including but not limited to α-helices, β-strands, and random coils. In some embodiments, the linker adopts an α-helix and comprises an amino acid repeat of (EAAAK)ₙ (SEQ ID NO: 18) where n is a repeat number from 1 to 20.

[0242] In some embodiments, the linker is comprised of (G₄S)ₙ (SEQ ID NO: 19) where n can be a repeat number from 1 to 30 (e.g. 1, 2, 3, 4, 5, 6, 7, 8, 9, 10, 11, 12, 13, 14, 15, 16, 17, 18, 19, 20, 21, 22, 23, 24, 25, 26, 27, 28, 29, or 30). In embodiments, the linker has a repeat of (SGGG)n (SEQ ID NO: 20), wherein n is an integer from 1 to 50 (e.g. 1, 2, 3, 4, 5, 6, 7, 8, 9, 10, 11, 12, 13, 14, 15, 16, 17, 18, 19, 20). In embodiments, the linker has a repeat of (GGGS)ₙ (SEQ ID NO: 21), wherein n is an integer from 1 to 20 (e.g. 1, 2, 3, 4, 5, 6, 7, 8, 9, 10, 11, 12, 13, 14, 15, 16, 17, 18, 19, or 20). In some embodiments, the linker has a repeat of (GₓS)ₙ (SEQ ID NO: 141), wherein x is an integer from 1 to 6 (e.g. 1, 2, 3, 4, 5, or 6), and n is an integer from 1 to 30 (e.g. 1, 2, 3, 4, 5, 6, 7, 8, 9, 10, 11, 12, 13, 14, 15, 16, 17, 18, 19, 20, 21, 22, 23, 24, 25, 26, 27, 28, 29, or 30). In some embodiments, the linker has a repeat of (SₓG)ₙ (SEQ ID NO: 142), wherein x is an integer from 1 to 6 (e.g. 1, 2, 3, 4, 5, or 6), and n is an integer from 1 to 30 (e.g. 1, 2, 3, 4, 5, 6, 7, 8, 9, 10, 11, 12, 13, 14, 15, 16, 17, 18, 19, 20, 21, 22, 23, 24, 25, 26, 27, 28, 29, or 30).

[0243] In some embodiments, the linker has an amino acid sequence of KESGSVSSEQLAQFRSLD (SEQ ID NO: 22). In some embodiments, the linker has an amino acid sequence of EGKSSGSGSESKST (SEQ ID NO: 23). In some embodiments, the linker only comprises glycine.

[0244] In some embodiments, the linker is cleavable. For example, the linker may be cleaved by a protease. In some embodiments, the peptide linker comprises a protease cleavage site. In some embodiments, the protease cleavage site is a furin cleavage site.

[0245] In some aspects, the linker is a poly-(Gly)ₙ linker, wherein n is 1, 2, 3, 4, 5, 6, 7, 8, 9, 10, 15, 16, 17, 18, 19, 20, 21, 22, 23, 24, 25, 26, 27, 28, 29, or 30 (SEQ ID NO: 48). In other embodiments, the linker is selected from the group consisting of: dipeptides, tripeptides, and quadripeptides. In embodiments, the linker is a dipeptide selected from the group consisting of alanine-serine (AS), leucine-glutamic acid (LE), and serine-arginine (SR).

[0246] In some embodiments, the linker is selected from GKSSGSGSESKS (SEQ ID NO: 157), GSTSGSGKSSEGKG (SEQ ID NO: 158), GSTSGSGKSSEGSGSTKG (SEQ ID NO: 159), GSTSGSGKPGSGEGSTKG (SEQ ID NO: 160), EGKSSGSGSESKEF (SEQ ID NO: 161), SRSSG (SEQ ID NO: 162), and SGSSC (SEQ ID NO: 163).

[0247] In some embodiments, the linker is a self-cleaving peptide. In some embodiments, the self-cleaving peptide is a 2A peptide. 2A peptides are a class of 18-22 amino acid long peptides that induce ribosomal skipping during translation of a protein in a cell. In some embodiments, the 2A peptide is a T2A peptide having an amino acid sequence of EGRGSLLTCGDVEENPGP (SEQ ID NO: 164), a P2A peptide having an amino acid sequence of ATNFSLLKQAGDVEENPGP (SEQ ID NO: 165), an E2A peptide having an amino acid sequence of QCTNYALLKLAGDVESNPGP (SEQ ID NO: 166), or an F2A peptide having an amino acid sequence of VKQTLNFDLLKLAGDVESNPGP (SEQ ID NO: 167). In some embodiments, the 2A peptide has at least 80%, at least 85%, at least 90%, at least 95%, or at least 98% identity to any one of SEQ ID NOs. 164-167. In some embodiments, the 2A peptide further comprises GSG (SEQ ID NO: 168) on its N-terminus.

[0248] In some embodiments, a fusion protein comprises, from N-terminus to C-terminus, a first polypeptide, a linker, and a second polypeptide with phase behavior. In some embodiments, a fusion protein comprises, from N-terminus to C-terminus, a second polypeptide with phase behavior, a linker, and a first polypeptide.

Methods for Stabilizing, Improving Yield, and Preventing Loss of Activity, Unfolding, Degradation, and/or Misfolding the First Polypeptide of a Fusion Protein

[0249] The instant inventors have discovered that expression of a first polypeptide as a fusion protein comprising the first polypeptide and a second polypeptide with phase behavior may unexpectedly help stabilize the first polypeptide during production, purification, and/or storage thereof. As used herein with relation to the first polypeptide, the terms “stabilize” or “stabilizing” refers to the ability of expression as a fusion protein comprising a first polypeptide and a second polypeptide with phase behavior to reduce degradation or aggregation of a sample comprising a plurality of first polypeptides, to prevent the first polypeptides from binding other proteins or to themselves, to enhance synthesis of a first polypeptide by a producer cell, to prevent unfolding of a first polypeptide, and to prevent misfolding of a first polypeptide.

[0250] Thus, in some embodiments, a method of stabilizing a first polypeptide is provided herein comprising expressing the first polypeptide as a fusion protein comprising the first polypeptide and a second polypeptide, wherein the second polypeptide is a polypeptide having phase behavior. In embodiments, the first polypeptide substantially retains its activity after the fusion protein is exposed to one or more conditions that would destabilize the first polypeptide. In some embodiments, a method of substantially preventing the unfolding, degradation and/or misfolding of the first polypeptide is provided herein comprising expressing a first polypeptide as a fusion protein of a first polypeptide and a second polypeptide having phase behavior, wherein when the fusion protein is exposed to one or more conditions that would cause unfolding, degradation, and/or misfolding. In some embodiments, a method for substantially preventing loss of activity of a first polypeptide after exposure to one or more conditions known to unfold, degrade, and/or misfold the first polypeptide is provided herein comprising expressing a fusion protein comprising the first polypeptide and the second polypeptide, wherein the second polypeptide is a polypeptide having phase behavior. In embodiments, any of the aforementioned methods comprises removing the fusion protein from the conditions known to destabilize the first polypeptide or conditions known to unfold, degrade, and/or misfold the first polypeptide; wherein the first polypeptide retains its activity compared to a control first polypeptide. The “control first polypeptide” refers to a first polypeptide that is not fused to a polypeptide with phase behavior and which has not been exposed to conditions that cause loss of activity, misfolding, unfolding, or degradation.

[0251] The term “activity” may refer to the binding affinity of a first polypeptide for its binding partner. For example, if the first polypeptide is PKD2 of the AAVR, the binding partner may be the capsid of an AAV viral particle. If the first polypeptide is protein A, the binding partner may be the Fc region of an immunoglobulin. When referring to an enzyme, the term “activity” may refer to the k_{cat}, also referred to herein as “turnover number.” k_{cat} is calculated using the formula Vₘₐₓ/Eₜ, where Vₘₐₓ is the maximum rate of reaction when all the enzyme catalytic sites are saturated with substrate and Eₜ is the total enzyme concentration or concentration of total enzyme catalytic sites. Multiple techniques may be utilized to determine enzyme kinetic parameters like “k_{cat}” and “Vₘₐₓ,” for example, surface plasmon resonance, Forster Resonance Energy Transfer (FRET), isothermal titration calorimetry, colorimetric, or fluorometric techniques.

[0252] Conditions known to destabilize, unfold, degrade, or misfold a first polypeptide include the introduction of one or more of the following: salt, exposure to a base (e.g., a Bronsted-Lowry base or Lewis base), exposure to an acid (e.g., a Bronsted-Lowry acid or Lewis acid), exposure to a temperature of at least 50° C., lyophilization, freeze-thaw cycles, autoclave, an oxidizing agent, a reducing agent, a chaotropic agent, a surfactant, an organic solvent, urea, or guanidine hydrochloride. In some embodiments, autoclaving, heat shock, a change in pH, exposure to light, agitation, mixing, a change in temperature (e.g., a freeze-thaw), storing a first polypeptide in a non-ideal orientation, or a tendency of the first polypeptide to aggregate cause unfolding, degradation, or misfolding of the first polypeptide. In embodiments, any of the environmental factors described herein may be a condition that destabilizes, unfolds, degrades, or misfolds a first polypeptide.

[0253] In embodiments, the conditions known to unfold, degrade, misfold, or destabilize the first polypeptide are exposure to guanidine hydrochloride, lyophilization, freeze-thaw cycles, exposure to sodium hydroxide, autoclaving, exposure to temperature of at least 50° C., or a combination thereof.

[0254] In embodiments, the fusion protein is exposed to one or more conditions known to unfold, degrade, misfold, or destabilize the first polypeptide for about 5 minutes to about 1 day. In embodiments, the first polypeptide is exposed to one or more conditions known to unfold, degrade, misfold, or destabilize the first polypeptide for about 10 minutes to about 30 minutes, about 15 minutes to about 30 minutes, about 15 minutes to 1 hour, about 30 minutes to about 12 hours, about 30 minutes to about 11 hours, about 30 minutes to about 10 hours, about 30 minutes to about 9 hours, about 30 minutes to about 8 hours, about 30 minutes to about 7 hours, about 30 minutes to about 6 hours, about 30 minutes to about 5 hours, about 30 minutes to about 4 hours, about 30 minutes to about 3 hours, about 30 minutes to about 2 hours, about 30 minutes to about 1 hour, or about 45 minutes to 1 hour. In embodiments the first polypeptide is exposed to a condition for about 1 minute, about 2 minutes, about 3 minutes, about 4 minutes, about 5 minutes, about 6 minutes, about 7 minutes, about 8 minutes, about 9 minutes, about 10 minutes, about 11 minutes, about 12 minutes, about 13 minutes, about 14 minutes, about 15 minutes, about 16 minutes, about 17 minutes, about 18 minutes, about 19 minutes, about 20 minutes, about 21 minutes, about 22 minutes, about 23 minutes, about 24 minutes, about 25 minutes, about 26 minutes, about 27 minutes, about 28 minutes, about 29 minutes, about 30 minutes, about 31 minutes, about 32 minutes, about 33 minutes, about 34 minutes, about 35 minutes, about 36 minutes, about 37 minutes, about 38 minutes, about 39 minutes, about 40 minutes, about 41 minutes, about 42 minutes, about 43 minutes, about 44 minutes, about 45 minutes, about 46 minutes, about 47 minutes, about 48 minutes, about 49 minutes, about 50 minutes, about 51 minutes, about 52 minutes, about 53 minutes, about 54 minutes, about 55 minutes, about 56 minutes, about 57 minutes, about 58 minutes, about 59 minutes, about 1 hour, about 2 hours, about 3 hours, about 4 hours, about 5 hours, about 6 hours, about 7 hours, about 8 hours, about 9 hours, about 10 hours, about 11 hours, about 12 hours, about 13 hours, about 14 hours, about 15 hours, about 16 hours, about 17 hours, about 18 hours, about 19 hours, about 20 hours, about 21 hours, about 22 hours, about 23 hours, or about 24 hours, including all subranges and values therebetween. In embodiments the first polypeptide is exposed to a condition for at least about 1 minute, at least about 2 minutes, at least about 3 minutes, at least about 4 minutes, at least about 5 minutes, at least about 6 minutes, at least about 7 minutes, at least about 8 minutes, at least about 9 minutes, at least about 10 minutes, at least about 11 minutes, at least about 12 minutes, at least about 13 minutes, at least about 14 minutes, at least about 15 minutes, at least about 16 minutes, at least about 17 minutes, at least about 18 minutes, at least about 19 minutes, at least about 20 minutes, at least about 21 minutes, at least about 22 minutes, at least about 23 minutes, at least about 24 minutes, at least about 25 minutes, at least about 26 minutes, at least about 27 minutes, at least about 28 minutes, at least about 29 minutes, at least about 30 minutes, at least about 31 minutes, at least about 32 minutes, at least about 33 minutes, at least about 34 minutes, at least about 35 minutes, at least about 36 minutes, at least about 37 minutes, at least about 38 minutes, at least about 39 minutes, at least about 40 minutes, at least about 41 minutes, at least about 42 minutes, at least about 43 minutes, at least about 44 minutes, at least about 45 minutes, at least about 46 minutes, at least about 47 minutes, at least about 48 minutes, at least about 49 minutes, at least about 50 minutes, at least about 51 minutes, at least about 52 minutes, at least about 53 minutes, at least about 54 minutes, at least about 55 minutes, at least about 56 minutes, at least about 57 minutes, at least about 58 minutes, at least about 59 minutes, at least about 1 hour, at least about 2 hours, at least about 3 hours, at least about 4 hours, at least about 5 hours, at least about 6 hours, at least about 7 hours, at least about 8 hours, at least about 9 hours, at least about 10 hours, at least about 11 hours, at least about 12 hours, at least about 13 hours, at least about 14 hours, at least about 15 hours, at least about 16 hours, at least about 17 hours, at least about 18 hours, at least about 19 hours, at least about 20 hours, at least about 21 hours, at least about 22 hours, at least about 23 hours, or at least about 24 hours. In embodiments, the first polypeptide is exposed to one or more conditions known to unfold, degrade, misfold, or destabilize the first polypeptide for about 30 minutes. In embodiments, the first polypeptide is exposed to one or more conditions known to unfold, degrade, misfold, or destabilize the first polypeptide for at least about 30 minutes. In embodiments, the first polypeptide is exposed to one or more conditions known to unfold, degrade, misfold, or destabilize the first polypeptide for about 10 minutes to about 30 minutes.

[0255] In embodiments, the fusion protein is exposed to a temperature ranging from about 50° C. to about 99° C., e.g., about 50° C., about 55° C., about 60° C., about 65° C., about 70° C., about 75° C., about 80° C., about 85° C., about 90° C., about 91° C., about 92° C., about 93° C., about 94° C., about 95° C., about 96° C., about 97° C., about 98° C., or about 99° C. including all subranges and values therebetween. In embodiments, the fusion protein is exposed to at least about 50° C., at least about 55° C., at least about 60° C., at least about 65° C., at least about 70° C., at least about 75° C., at least about 80° C., at least about 85° C., at least about 90° C., at least about 91° C., at least about 92° C., at least about 93° C., at least about 94° C., at least about 95° C., at least about 96° C., at least about 97° C., at least about 98° C., or at least about 99° C.

[0256] In embodiments, the condition known to destabilize, unfold, degrade, or misfold a first polypeptide is exposure to guanidine hydrochloride. In embodiments, the first polypeptide is exposed to from 1 M to about 10 M guanidine hydrochloride. In embodiments, the first polypeptide is exposed to about 1 M, about 1.1 M, about 1.2 M, about 1.3 M, about 1.4 M, about 1.5 M, about 1.6 M, about 1.7 M, about 1.8 M, about 1.9 M, about 2 M, about 2.1 M, about 2.2 M, about 2.3 M, about 2.4 M, about 2.5 M, about 2.6 M, about 2.7 M, about 2.8 M, about 2.9 M, about 3 M, about 3.1 M, about 3.2 M, about 3.3 M, about 3.4 M, about 3.5 M, about 3.6 M, about 3.7 M, about 3.8 M, about 3.9 M, about 4 M, about 4.1 M, about 4.2 M, about 4.3 M, about 4.4 M, about 4.5 M, about 4.6 M, about 4.7 M, about 4.8 M, about 4.9 M, about 5 M, about 5.1 M, about 5.2 M, about 5.3 M, about 5.4 M, about 5.5 M, about 5.6 M, about 5.7 M, about 5.8 M, about 5.9 M, about 6 M, about 6.1 M, about 6.2 M, about 6.3 M, about 6.4 M, about 6.5 M, about 6.6 M, about 6.7 M, about 6.8 M, about 6.9 M, about 7 M, about 7.1 M, about 7.2 M, about 7.3 M, about 7.4 M, about 7.5 M, about 7.6 M, about 7.7 M, about 7.8 M, about 7.9 M, about 8 M, about 8.1 M, about 8.2 M, about 8.3 M, about 8.4 M, about 8.5 M, about 8.6 M, about 8.7 M, about 8.8 M, about 8.9 M, about 9 M, about 9.1 M, about 9.2 M, about 9.3 M, about 9.4 M, about 9.5 M, about 9.6 M, about 9.7 M, about 9.8 M, about 9.9 M, or about 10 M guanidine hydrochloride, including all subranges and values therebetween. In embodiments, the first polypeptide is exposed to at least about 1 M, at least about 1.1 M, at least about 1.2 M, at least about 1.3 M, at least about 1.4 M, at least about 1.5 M, at least about 1.6 M, at least about 1.7 M, at least about 1.8 M, at least about 1.9 M, at least about 2 M, at least about 2.1 M, at least about 2.2 M, at least about 2.3 M, at least about 2.4 M, at least about 2.5 M, at least about 2.6 M, at least about 2.7 M, at least about 2.8 M, at least about 2.9 M, at least about 3 M, at least about 3.1 M, at least about 3.2 M, at least about 3.3 M, at least about 3.4 M, at least about 3.5 M, at least about 3.6 M, at least about 3.7 M, at least about 3.8 M, at least about 3.9 M, at least about 4 M, at least about 4.1 M, at least about 4.2 M, at least about 4.3 M, at least about 4.4 M, at least about 4.5 M, at least about 4.6 M, at least about 4.7 M, at least about 4.8 M, at least about 4.9 M, at least about 5 M, at least about 5.1 M, at least about 5.2 M, at least about 5.3 M, at least about 5.4 M, at least about 5.5 M, at least about 5.6 M, at least about 5.7 M, at least about 5.8 M, at least about 5.9 M, at least about 6 M, at least about 6.1 M, at least about 6.2 M, at least about 6.3 M, at least about 6.4 M, at least about 6.5 M, at least about 6.6 M, at least about 6.7 M, at least about 6.8 M, at least about 6.9 M, at least about 7 M, at least about 7.1 M, at least about 7.2 M, at least about 7.3 M, at least about 7.4 M, at least about 7.5 M, at least about 7.6 M, at least about 7.7 M, at least about 7.8 M, at least about 7.9 M, at least about 8 M, at least about 8.1 M, at least about 8.2 M, at least about 8.3 M, at least about 8.4 M, at least about 8.5 M, at least about 8.6 M, at least about 8.7 M, at least about 8.8 M, at least about 8.9 M, at least about 9 M, at least about 9.1 M, at least about 9.2 M, at least about 9.3 M, at least about 9.4 M, at least about 9.5 M, at least about 9.6 M, at least about 9.7 M, at least about 9.8 M, at least about 9.9 M, or at least about 10 M guanidine hydrochloride. In embodiments, the condition known to destabilize, unfold, degrade, or misfold a first polypeptide is exposure to 6M guanidine hydrochloride. In embodiments, the condition known to destabilize, unfold, degrade, or misfold a first polypeptide is exposure to 6M guanidine hydrochloride for 30 minutes. In embodiments, the condition known to destabilize, unfold, degrade, or misfold a first polypeptide is exposure to 6M guanidine hydrochloride for at least 30 minutes. In embodiments, the condition known to destabilize, unfold, degrade, or misfold a first polypeptide is exposure to 6M guanidine hydrochloride for 10-30 minutes.

[0257] In embodiments, the condition known to destabilize, unfold, degrade, or misfold a first polypeptide is exposure to sodium hydroxide. In embodiments, the first polypeptide is exposed to from 0.001 M to about 10 M sodium hydroxide. In embodiments, the first polypeptide is exposed to about 0.001 M, about 0.01 M, about 0.02 M, about 0.03 M, about 0.04 M, about 0.05 M, about 0.06 M, about 0.07 M, about 0.08 M, about 0.09 M, about 0.1 M, about 0.2 M, about 0.3 M, about 0.4 M, about 0.5 M, about 0.6 M, about 0.7 M, about 0.8 M, about 0.9 M, about 1 M, about 1.1 M, about 1.2 M, about 1.3 M, about 1.4 M, about 1.5 M, about 1.6 M, about 1.7 M, about 1.8 M, about 1.9 M, about 2 M, about 2.1 M, about 2.2 M, about 2.3 M, about 2.4 M, about 2.5 M, about 2.6 M, about 2.7 M, about 2.8 M, about 2.9 M, about 3 M, about 3.1 M, about 3.2 M, about 3.3 M, about 3.4 M, about 3.5 M, about 3.6 M, about 3.7 M, about 3.8 M, about 3.9 M, about 4 M, about 4.1 M, about 4.2 M, about 4.3 M, about 4.4 M, about 4.5 M, about 4.6 M, about 4.7 M, about 4.8 M, about 4.9 M, about 5 M, about 5.1 M, about 5.2 M, about 5.3 M, about 5.4 M, about 5.5 M, about 5.6 M, about 5.7 M, about 5.8 M, about 5.9 M, about 6 M, about 6.1 M, about 6.2 M, about 6.3 M, about 6.4 M, about 6.5 M, about 6.6 M, about 6.7 M, about 6.8 M, about 6.9 M, about 7 M, about 7.1 M, about 7.2 M, about 7.3 M, about 7.4 M, about 7.5 M, about 7.6 M, about 7.7 M, about 7.8 M, about 7.9 M, about 8 M, about 8.1 M, about 8.2 M, about 8.3 M, about 8.4 M, about 8.5 M, about 8.6 M, about 8.7 M, about 8.8 M, about 8.9 M, about 9 M, about 9.1 M, about 9.2 M, about 9.3 M, about 9.4 M, about 9.5 M, about 9.6 M, about 9.7 M, about 9.8 M, about 9.9 M, or about 10 M sodium hydroxide, including all subranges and values therebetween. In embodiments, the first polypeptide is exposed to at least about 0.001 M, at least about 0.01 M, at least about 0.02 M, at least about 0.03 M, at least about 0.04 M, at least about 0.05 M, at least about 0.06 M, at least about 0.07 M, at least about 0.08 M, at least about 0.09 M, at least about 0.1 M, at least about 0.2 M, at least about 0.3 M, at least about 0.4 M, at least about 0.5 M, at least about 0.6 M, at least about 0.7 M, at least about 0.8 M, at least about 0.9 M, at least about 1 M, at least about 1.1 M, at least about 1.2 M, at least about 1.3 M, at least about 1.4 M, at least about 1.5 M, at least about 1.6 M, at least about 1.7 M, at least about 1.8 M, at least about 1.9 M, at least about 2 M, at least about 2.1 M, at least about 2.2 M, at least about 2.3 M, at least about 2.4 M, at least about 2.5 M, at least about 2.6 M, at least about 2.7 M, at least about 2.8 M, at least about 2.9 M, at least about 3 M, at least about 3.1 M, at least about 3.2 M, at least about 3.3 M, at least about 3.4 M, at least about 3.5 M, at least about 3.6 M, at least about 3.7 M, at least about 3.8 M, at least about 3.9 M, at least about 4 M, at least about 4.1 M, at least about 4.2 M, at least about 4.3 M, at least about 4.4 M, at least about 4.5 M, at least about 4.6 M, at least about 4.7 M, at least about 4.8 M, at least about 4.9 M, at least about 5 M, at least about 5.1 M, at least about 5.2 M, at least about 5.3 M, at least about 5.4 M, at least about 5.5 M, at least about 5.6 M, at least about 5.7 M, at least about 5.8 M, at least about 5.9 M, at least about 6 M, at least about 6.1 M, at least about 6.2 M, at least about 6.3 M, at least about 6.4 M, at least about 6.5 M, at least about 6.6 M, at least about 6.7 M, at least about 6.8 M, at least about 6.9 M, at least about 7 M, at least about 7.1 M, at least about 7.2 M, at least about 7.3 M, at least about 7.4 M, at least about 7.5 M, at least about 7.6 M, at least about 7.7 M, at least about 7.8 M, at least about 7.9 M, at least about 8 M, at least about 8.1 M, at least about 8.2 M, at least about 8.3 M, at least about 8.4 M, at least about 8.5 M, at least about 8.6 M, at least about 8.7 M, at least about 8.8 M, at least about 8.9 M, at least about 9 M, at least about 9.1 M, at least about 9.2 M, at least about 9.3 M, at least about 9.4 M, at least about 9.5 M, at least about 9.6 M, at least about 9.7 M, at least about 9.8 M, at least about 9.9 M, or at least about 10 M sodium hydroxide. In embodiments, the condition known to destabilize, unfold, degrade, or misfold a first polypeptide is exposure to 0.1 M sodium hydroxide. In embodiments, the condition known to destabilize, unfold, degrade, or misfold a first polypeptide is exposure to 0.1 M sodium hydroxide for about 30 minutes. In embodiments, the condition known to destabilize, unfold, degrade, or misfold a first polypeptide is exposure to 0.1 M sodium hydroxide for at least about 30 minutes. In embodiments, the condition known to destabilize, unfold, degrade, or misfold a first polypeptide is exposure to 0.1 M sodium hydroxide for 10-30 minutes.

[0258] In embodiments, the condition known to destabilize, unfold, degrade, or misfold a first polypeptide is a freeze-thaw cycle. In embodiments, a freeze-thaw cycle comprises freezing the solution containing the first polypeptide and then bringing the solution to a temperature above freezing. In embodiments, the first polypeptide is subjected to multiple freeze-thaw cycles. In embodiments, the first polypeptide is subjected to from 2 to 10, from 2 to 20, from 2 to 30, from 2 to 40, or from 2 to 50 freeze thaw cycles. In embodiments, the first polypeptide may be subjected to about 1, about 2, about 3, about 4, about 5, about 6, about 7, about 8, about 9, about 10, about 11, about 12, about 13, about 14, about 15, about 16, about 17, about 18, about 19, about 20, about 21, about 22, about 23, about 24, about 25, about 26, about 27, about 28, about 29, about 30, about 31, about 32, about 33, about 34, about 35, about 36, about 37, about 38, about 39, about 40, about 41, about 42, about 43, about 44, about 45, about 46, about 47, about 48, about 49, about 50, about 51, about 52, about 53, about 54, about 55, about 56, about 57, about 58, about 59, about 60, about 61, about 62, about 63, about 64, about 65, about 66, about 67, about 68, about 69, about 70, about 71, about 72, about 73, about 74, about 75, about 76, about 77, about 78, about 79, about 80, about 81, about 82, about 83, about 84, about 85, about 86, about 87, about 88, about 89, about 90, about 91, about 92, about 93, about 94, about 95, about 96, about 97, about 98, about 99, or about 100 freeze-thaw cycles. In embodiments, the first polypeptide may be subjected to at least about 1, at least about 2, at least about 3, at least about 4, at least about 5, at least about 6, at least about 7, at least about 8, at least about 9, at least about 10, at least about 11, at least about 12, at least about 13, at least about 14, at least about 15, at least about 16, at least about 17, at least about 18, at least about 19, at least about 20, at least about 21, at least about 22, at least about 23, at least about 24, at least about 25, at least about 26, at least about 27, at least about 28, at least about 29, at least about 30, at least about 31, at least about 32, at least about 33, at least about 34, at least about 35, at least about 36, at least about 37, at least about 38, at least about 39, at least about 40, at least about 41, at least about 42, at least about 43, at least about 44, at least about 45, at least about 46, at least about 47, at least about 48, at least about 49, at least about 50, at least about 51, at least about 52, at least about 53, at least about 54, at least about 55, at least about 56, at least about 57, at least about 58, at least about 59, at least about 60, at least about 61, at least about 62, at least about 63, at least about 64, at least about 65, at least about 66, at least about 67, at least about 68, at least about 69, at least about 70, at least about 71, at least about 72, at least about 73, at least about 74, at least about 75, at least about 76, at least about 77, at least about 78, at least about 79, at least about 80, at least about 81, at least about 82, at least about 83, at least about 84, at least about 85, at least about 86, at least about 87, at least about 88, at least about 89, at least about 90, at least about 91, at least about 92, at least about 93, at least about 94, at least about 95, at least about 96, at least about 97, at least about 98, at least about 99, or at least about 100 freeze-thaw cycles.

[0259] In embodiments, the condition known to destabilize, unfold, degrade, or misfold a first polypeptide is heat shock. In embodiments, the first polypeptide is heat shocked by heating the first polypeptide to at least 90° C., at least 91° C., at least 92° C., at least 93° C., at least 94° C., or at least 95° C. for about 10 minutes, about 11 minutes, about 12 minutes, about 13 minutes, about 14 minutes, about 15 minutes, about 16 minutes, about 17 minutes, about 18 minutes, about 19 minutes, about 20 minutes, about 21 minutes, about 22 minutes, about 23 minutes, about 24 minutes, about 25 minutes, about 26 minutes, about 27 minutes, about 28 minutes, about 29 minutes, about 30 minutes, or more; placing a container containing the first polypeptide on ice, and then returning the fusion protein to room temperature. In embodiments, the first polypeptide is heat shocked by heating the first polypeptide to at least 90° C., at least 91° C., at least 92° C., at least 93° C., at least 94° C., or at least 95° C. for at least about 10 minutes, at least about 11 minutes, at least about 12 minutes, at least about 13 minutes, at least about 14 minutes, at least about 15 minutes, at least about 16 minutes, at least about 17 minutes, at least about 18 minutes, at least about 19 minutes, at least about 20 minutes, at least about 21 minutes, at least about 22 minutes, at least about 23 minutes, at least about 24 minutes, at least about 25 minutes, at least about 26 minutes, at least about 27 minutes, at least about 28 minutes, at least about 29 minutes, at least about 30 minutes, or more; placing a container containing the first polypeptide on ice, and then returning the fusion protein to room temperature.

[0260] In embodiments, heating to at least 90° C., at least 91° C., at least 92° C., at least 93° C., at least 94° C., or at least 95° C. is known to destabilize, unfold, degrade, or misfold a first polypeptide. In embodiments, the one or more conditions known to destabilize, unfold, degrade, or misfold a first polypeptide is heating to at least 90° C. In embodiments, the one or more conditions known to destabilize, unfold, degrade, or misfold a first polypeptide is heating to at least 95° C. In embodiments, the one or more conditions known to destabilize, unfold, degrade, or misfold a first polypeptide is heating to at least 90° C. for at least 30 minutes. In embodiments, the one or more conditions known to destabilize, unfold, degrade, or misfold a first polypeptide is heating to at least 95° C. for at least 30 minutes. In embodiments, the one or more conditions known to destabilize, unfold, degrade, or misfold a first polypeptide is heating to at least 95° C. for 10-30 minutes.

[0261] In embodiments, the condition known to destabilize, unfold, degrade, or misfold a first polypeptide is exposure to non-physiologic pH. The term non-physiologic pH refers to a pH that is not from 7.2 to about 7.4. In embodiments, the non-physiologic pH is acidic pH. In embodiments, the condition known to destabilize, unfold, degrade, or misfold a first polypeptide is exposure to an acidic pH. In embodiments, the condition known to destabilize, unfold, degrade, or misfold a first polypeptide is exposure to an acidic pH from about 0.5 to about 7, from about 0.5 to about 6, from about 0.5 to about 5, from about 0.5 to about 4, from about 0.5 to about 3, from about 0.5 to about 2, or from about 0.5 to about 1. In embodiments, the acidic pH is about 1, about 1.1, about 1.2, about 1.3, about 1.4, about 1.5, about 1.6, about 1.7, about 1.8, about 1.9, about 2, about 2.1, about 2.2, about 2.3, about 2.4, about 2.5, about 2.6, about 2.7, about 2.8, about 2.9, about 3, about 3.1, about 3.2, about 3.3, about 3.4, about 3.5, about 3.6, about 3.7, about 3.8, about 3.9, about 4, about 4.1, about 4.2, about 4.3, about 4.4, about 4.5, about 4.6, about 4.7, about 4.8, about 4.9, about 5, about 5.1, about 5.2, about 5.3, about 5.4, about 5.5, about 5.6, about 5.7, about 5.8, about 5.9, about 6, about 6.1, about 6.2, about 6.3, about 6.4, about 6.5, about 6.6, about 6.7, about 6.8, about 6.9, about 7, or about 7.1, including all subranges and ranges therebetween. In embodiments, the condition known to destabilize, unfold, degrade, or misfold a first polypeptide is exposure to pH of about 4. In embodiments, the condition known to destabilize, unfold, degrade, or misfold a first polypeptide is exposure to pH of about 4 for about 10-30 minutes. In embodiments, the condition known to destabilize, unfold, degrade, or misfold a first polypeptide is exposure to pH of about 4 for about 30 minutes.

[0262] In embodiments, the condition known to destabilize, unfold, degrade, or misfold a first polypeptide is exposure to pH of about 4 and a temperature of to at least 95° C. for at least 30 minutes. In embodiments, the condition known to destabilize, unfold, degrade, or misfold a first polypeptide is exposure to pH of about 4 and a temperature of to at least 95° C. for 10-30 minutes.

[0263] In embodiments, the nonphysiologic pH is basic pH. In embodiments, the basic pH from about 7.5 to about 14, from about 7.5 to about 13, from about 7.5 to about 12, from about 7.5 to about 11, from about 7.5 to about 10, from about 7.5 to about 9, or from about 7.5 to about 8.5. In embodiments, the basic pH is about 8, about 8.1, about 8.2, about 8.3, about 8.4, about 8.5, about 8.6, about 8.7, about 8.8, about 8.9, about 9, about 9.1, about 9.2, about 9.3, about 9.4, about 9.5, about 9.6, about 9.7, about 9.8, about 9.9, about 10, about 10.1, about 10.2, about 10.3, about 10.4, about 10.5, about 10.6, about 10.7, about 10.8, about 10.9, about 11, about 11.1, about 11.2, about 11.3, about 11.4, about 11.5, about 11.6, about 11.7, about 11.8, about 11.9, about 12, about 12.1, about 12.2, about 12.3, about 12.4, about 12.5, about 12.6, about 12.7, about 12.8, about 12.9, about 13, about 13.1, about 13.2, about 13.3, about 13.4, about 13.5, about 13.6, about 13.7, about 13.8, about 13.9, or about 14, including all subranges and ranges therebetween.

[0264] In some embodiments, less than about 35%, less than about 30%, less than about 25%, less than about 20%, less than about 15%, less than about 10%, less than about 5%, less than about 3%, less than about 2%, or less than 1% of the activity of the first polypeptide is lost after exposure to one or more of the conditions as compared to a control polypeptide. In some embodiments, less than about 25% of the activity of the first polypeptide is lost after exposure to one or more of the conditions as compared to a control polypeptide. In some embodiments, less than about 20% of the activity of the first polypeptide is lost after exposure to one or more of the conditions as compared to a control polypeptide.

[0265] In some embodiments, a first polypeptide expressed as a fusion protein comprising a first polypeptide and a second polypeptide with phase behavior retains from about 50% to about 100%, from about 55% to about 100%, from about 60% to about 100%, from about 65% to about 100%, from about 70% to about 100%, from about 75% to about 100%, from about 80% to about 100%, from about 85% to about 100%, from about 90% to about 100%, or from about 95% to about 100% of its activity after exposure to one or more of the conditions as compared to a control polypeptide. In some embodiments, a first polypeptide retains at least 65%, at least 70%, at least 75%, at least 80%, at least 85%, at least 90%, at least 95%, at least 96%, at least 97%, at least 98%, at least 99%, or 100% of its activity after exposure to one or more of the conditions as compared to a control. In some embodiments, a first polypeptide retains at least 80% of its activity after exposure to one or more of the conditions as compared to a control. Activity of a first polypeptide may be measured using a functional assay, enzyme-linked immunosorbent assay, or flow cytometry.

[0266] In some embodiments, the first polypeptide retains its activity after exposure to temperatures ranging from −20° C. to about 35° C. (e.g., at about −20° C., about −19° C., about −18° C., about −17° C., about −16° C., about −15° C., about −14° C., about −13° C., about −12° C., about −11° C., about −10° C., about −9° C., about −8° C., about −7° C., about −6° C., about −5° C., about −4° C., about-3° C., about −2° C., about −1° C., about 0° C., about 1° C., about 2° C., about 3° C., about 4° C., about 5° C., about 6° C., about 7° C., about 8° C., about 9° C., about 10° C., about 11° C., about 12° C., about 13° C., about 14° C., about 15° C., about 16° C., about 17° C., about 18° C., about 19° C., about 20° C., about 21° C., about 22° C., about 23° C., about 24° C., about 25° C., about 26° C., about 27° C., about 28° C., about 29° C., about 30° C., about 31° C., about 32° C., about 33° C., about 34° C., about 35° C. including any values or subranges therebetween) for about 1 week to about 10 years (e.g., about 1 week, about 2 weeks, about 3 weeks, about 4 weeks, about 5 weeks, about 6 weeks, about 7 weeks, about 8 weeks, about 9 weeks, about 10 weeks, about 11 weeks, about 12 weeks, about 1 month, about 2 months, about 3 months, about 4 months, about 5 months, about 6 months, about 7 months, about 8 months, about 9 months, about 10 months, about 11 months, about 12 months, about 1 year, about 2 years, about 3 years, about 4 years, about 5 years, about 6 years, about 7 years, about 8 years, about 9 years, or about 10 years, including all subranges and values therebetween). In some embodiments, the first polypeptide retains its activity after exposure to temperatures ranging from −20° C. to about 35° C. (e.g., at about −20° C., about −19° C., about −18° C., about −17° C., about −16° C., about −15° C., about −14° C., about −13° C., about −12° C., about −11° C., about −10° C., about −9° C., about −8° C., about −7° C., about −6° C., about −5° C., about −4° C., about −3° C., about −2° C., about −1° C., about 0° C., about 1° C., about 2° C., about 3° C., about 4° C., about 5° C., about 6° C., about 7° C., about 8° C., about 9° C., about 10° C., about 11° C., about 12° C., about 13° C., about 14° C., about 15° C., about 16° C., about 17° C., about 18° C., about 19° C., about 20° C., about 21° C., about 22° C., about 23° C., about 24° C., about 25° C., about 26° C., about 27° C., about 28° C., about 29° C., about 30° C., about 31° C., about 32° C., about 33° C., about 34° C., about 35° C. including any values or subranges therebetween) for about 1 week to about 10 years (e.g., at least about 1 week, at least about 2 weeks, at least about 3 weeks, at least about 4 weeks, at least about 5 weeks, at least about 6 weeks, at least about 7 weeks, at least about 8 weeks, at least about 9 weeks, at least about 10 weeks, at least about 11 weeks, at least about 12 weeks, at least about 1 month, at least about 2 months, at least about 3 months, at least about 4 months, at least about 5 months, at least about 6 months, at least about 7 months, at least about 8 months, at least about 9 months, at least about 10 months, at least about 11 months, at least about 12 months, at least about 1 year, at least about 2 years, at least about 3 years, at least about 4 years, at least about 5 years, at least about 6 years, at least about 7 years, at least about 8 years, at least about 9 years, or at least about 10 years, including all subranges and values therebetween).

[0267] In some embodiments, the first polypeptide retains its activity after exposure to about 4° C. for about 1 week to about 10 years. In some embodiments, the first polypeptide retains its activity at about 4° C. for about 1 week, about 2 weeks, about 3 weeks, about 4 weeks, about 5 weeks, about 6 weeks, about 7 weeks, about 8 weeks, about 9 weeks, about 10 weeks, about 11 weeks, about 12 weeks, about 1 month, about 2 months, about 3 months, about 4 months, about 5 months, about 6 months, about 7 months, about 8 months, about 9 months, about 10 months, about 11 months, about 12 months, about 1 year, about 2 years, about 3 years, about 4 years, about 5 years, about 6 years, about 7 years, about 8 years, about 9 years, about 10 years, or more, including all subranges and values therebetween. In some embodiments, the first polypeptide retains its activity at at least about 4° C. for at least about 1 week, at least about 2 weeks, at least about 3 weeks, at least about 4 weeks, at least about 5 weeks, at least about 6 weeks, at least about 7 weeks, at least about 8 weeks, at least about 9 weeks, at least about 10 weeks, at least about 11 weeks, at least about 12 weeks, at least about 1 month, at least about 2 months, at least about 3 months, at least about 4 months, at least about 5 months, at least about 6 months, at least about 7 months, at least about 8 months, at least about 9 months, at least about 10 months, at least about 11 months, at least about 12 months, at least about 1 year, at least about 2 years, at least about 3 years, at least about 4 years, at least about 5 years, at least about 6 years, at least about 7 years, at least about 8 years, at least about 9 years, at least about 10 years, or more, including all subranges and values therebetween.

[0268] In some embodiments, the first polypeptide retains its activity after exposure to −20° C. for about 6 months to about 10 years. In some embodiments, the first polypeptide retains its activity at about 4° C. for about 6 months, about 7 months, about 8 months, about 9 months, about 10 months, about 11 months, about 12 months, about 1 year, about 2 years, about 3 years, about 4 years, about 5 years, about 6 years, about 7 years, about 8 years, about 9 years, about 10 years, or more, including all subranges and values therebetween. In some embodiments, the first polypeptide retains its activity at at least about 4° C. for at least about 6 months, at least about 7 months, at least about 8 months, at least about 9 months, at least about 10 months, at least about 11 months, at least about 12 months, at least about 1 year, at least about 2 years, at least about 3 years, at least about 4 years, at least about 5 years, at least about 6 years, at least about 7 years, at least about 8 years, at least about 9 years, at least about 10 years, or more, including all subranges and values therebetween.

[0269] In some embodiments, one or more of the following techniques is used to evaluate the ability of the methods of the disclosure to stabilize a first polypeptide: size exclusion chromatography, ion exchange and reversed phase high-performance liquid chromatography, sodium dodecyl sulfate polyacrylamide gel electrophoresis, capillary electrophoresis, potency assays, dynamic light scattering, spectroscopy, microscopy, and physicochemical measurements of appearance, pH, and particle size.

[0270] In some embodiments, expression of a first polypeptide as a fusion protein comprising a first polypeptide and a second polypeptide with phase behavior protects the first polypeptide from degrading during storage (e.g., freezing). In some embodiments, the methods described herein protect the first polypeptide from degrading, particularly during multiple freeze-thaw cycles. Aggregation of first polypeptide may be observed visually by microscopy and/or by a technique selected from the group consisting of x-ray scattering, laser diffraction, analytical ultracentrifugation, dynamic light scattering, nanoparticle tracking analysis, resonant mass measurement, size exclusion chromatography, gel permeation chromatography, light obscuration, and combinations thereof. In some embodiments, the first polypeptide may be frozen and stored as a fusion protein comprising a first polypeptide and a second polypeptide with phase behavior at temperatures from about −80° C. to about 40° C., for example, about −80° C., about −75° C., about −70° C., about −65° C., about −60° C., about −55° C., about −50° C., about −45° C., about −40° C., about −35° C., about −30° C., about −25° C., about −20° C., about −15° C., about −10° C., about −5° C., about 0° C., about 4° C., about 5° C., about 10° C., about 15° C., about 20° C., about 25° C., about 30° C., about 35° C., or about 40° C.

[0271] In some embodiments, when a first polypeptide is stored as a fusion protein comprising a first polypeptide and a second polypeptide with phase behavior, the shelf life of the first polypeptide is at least about 10% longer as compared to a first polypeptide that is not expressed as a fusion protein comprising a second polypeptide with phase behavior. For example, in some embodiments, the shelf life is at least about 10%, at least about 20%, at least about 30%, at least about 40%, at least about 50%, at least about 60%, at least about 70%, at least about 80%, at least about 90%, at least about 100%, at least about 150%, at least about 200%, at least about 250%, at least about 300%, at least about 350%, at least about 400%, at least about 450%, or at least about 500% longer than the shelf life of a first polypeptide that is not expressed as a fusion protein comprising a second polypeptide with phase behavior stored at the same temperature. In some embodiments, when a first polypeptide is stored as a fusion protein comprising a first polypeptide and a second polypeptide with phase behavior, the shelf life of the first polypeptide is at least 1 month longer as compared to a first polypeptide that is not expressed as a fusion protein comprising a second polypeptide with phase behavior. For example, in some embodiments, the shelf life is at least about 1 month, at least about 2 months, at least about 3 months, at least about 4 months, at least about 5 months, at least about 6 months, at least about 7 months, at least about 8 months, at least about 9 months, at least about 10 months, at least about 11 months, or at least about 12 months longer than the shelf life of a first polypeptide that is not expressed as a fusion protein comprising a second polypeptide with phase behavior stored at the same temperature.

[0272] In some embodiments, a fusion polypeptide comprising a first polypeptide and a second polypeptide with phase behavior is stored at about −80° C. In some embodiments, a fusion polypeptide comprising a first polypeptide and a second polypeptide with phase behavior is stored at about −20° C. In some embodiments, a fusion polypeptide comprising a first polypeptide and a second polypeptide with phase behavior is stored at about 4° C. In some embodiments, a fusion polypeptide comprising a first polypeptide and a second polypeptide with phase behavior is stored at about 37° C. In some embodiments, when a fusion polypeptide comprising a first polypeptide and a second polypeptide with phase behavior is stored at about −80° C., about −20° C., about 4° C., or about 37° C., the shelf life of the first polypeptide is at least about 10% longer than if it was not expressed as a fusion protein and stored under the same conditions. For example, the shelf life of the first polypeptide may be at least about 10%, at least about 20%, at least about 30%, at least about 40%, at least about 50%, at least about 60%, at least about 70%, at least about 80%, at least about 90%, at least about 100%, at least about 150%, at least about 200%, at least about 250%, at least about 300%, at least about 350%, at least about 400%, at least about 450%, or at least about 500% longer than the shelf life of the first polypeptide not expressed as a fusion protein comprising a first polypeptide and a second polypeptide with phase behavior at the same temperature. As used herein, increased shelf life may refer to an increase in the amount of time a first polypeptide is stored and still retains its function. For example, a first polypeptide comprising a monoclonal antibody that binds to programmed cell death protein 1 (PD1) that retains its function retains the same affinity for PD1.

### Methods for Improving Production of a First Polypeptide

[0273] In some embodiments, provided herein is a method for improving the yield of a first polypeptide, the method comprising: (i) expressing a fusion protein comprising the first polypeptide and a second polypeptide having phase behavior; and (ii) separating the first polypeptide from the second polypeptide wherein the yield of the first polypeptide is improved when expressed as the fusion protein compared to a yield of the first polypeptide when the first polypeptide is not expressed as a fusion protein.

[0274] In some embodiments, the first polypeptide is separated from the second polypeptide by protease cleavage. In some embodiments, the protease is furin.

[0275] In some embodiments, the fusion protein is expressed in a host cell, selected from a mammalian cell, a bacterial cell, a fungal cell, a yeast cell, and a plant cell. In some embodiments, the host cell is E. coli. In some embodiments, the host cell is a CHO cell. In some embodiments, the host cell is a HEK293 cell.

[0276] In some embodiments, provided herein is a method of increasing yield of the first polypeptide during production thereof. In some embodiments, the yield of the first polypeptide produced as a fusion protein comprising a second polypeptide with phase behavior is higher than the yield of a first polypeptide expressed not as a fusion protein (i.e., without being fused to a second polypeptide with phase behavior). In embodiments, the yield of the first polypeptide when it is expressed as a fusion protein comprising a second polypeptide with phase behavior is about 1 mg per liter to about 1000 mg per liter. In embodiments, the yield of the first polypeptide when it is expressed as a fusion protein comprising a second polypeptide with phase behavior is about 1 mg, about 2 mg, about 3 mg, about 4 mg, about 5 mg, about 6 mg, about 7 mg, about 8 mg, about 9 mg, about 10 mg, about 11 mg, about 12 mg, about 13 mg, about 14 mg, about 15 mg, about 16 mg, about 17 mg, about 18 mg, about 19 mg, about 20 mg, about 21 mg, about 22 mg, about 23 mg, about 24 mg, about 25 mg, about 26 mg, about 27 mg, about 28 mg, about 29 mg, about 30 mg, about 31 mg, about 32 mg, about 33 mg, about 34 mg, about 35 mg, about 36 mg, about 37 mg, about 38 mg, about 39 mg, about 40 mg, about 41 mg, about 42 mg, about 43 mg, about 44 mg, about 45 mg, about 46 mg, about 47 mg, about 48 mg, about 49 mg, about 50 mg, about 51 mg, about 52 mg, about 53 mg, about 54 mg, about 55 mg, about 56 mg, about 57 mg, about 58 mg, about 59 mg, about 60 mg, about 61 mg, about 62 mg, about 63 mg, about 64 mg, about 65 mg, about 66 mg, about 67 mg, about 68 mg, about 69 mg, about 70 mg, about 71 mg, about 72 mg, about 73 mg, about 74 mg, about 75 mg, about 76 mg, about 77 mg, about 78 mg, about 79 mg, about 80 mg, about 81 mg, about 82 mg, about 83 mg, about 84 mg, about 85 mg, about 86 mg, about 87 mg, about 88 mg, about 89 mg, about 90 mg, about 91 mg, about 92 mg, about 93 mg, about 94 mg, about 95 mg, about 96 mg, about 97 mg, about 98 mg, about 99 mg, about 100 mg, about 110 mg, about 120 mg, about 130 mg, about 140 mg, about 150 mg, about 160 mg, about 170 mg, about 180 mg, about 190 mg, about 200 mg, about 210 mg, about 220 mg, about 230 mg, about 240 mg, about 250 mg, about 260 mg, about 270 mg, about 280 mg, about 290 mg, about 300 mg, about 310 mg, about 320 mg, about 330 mg, about 340 mg, about 350 mg, about 360 mg, about 370 mg, about 380 mg, about 390 mg, about 400 mg, about 410 mg, about 420 mg, about 430 mg, about 440 mg, about 450 mg, about 460 mg, about 470 mg, about 480 mg, about 490 mg, about 500 mg, about 510 mg, about 520 mg, about 530 mg, about 540 mg, about 550 mg, about 560 mg, about 570 mg, about 580 mg, about 590 mg, about 600 mg, about 610 mg, about 620 mg, about 630 mg, about 640 mg, about 650 mg, about 660 mg, about 670 mg, about 680 mg, about 690 mg, about 700 mg, about 710 mg, about 720 mg, about 730 mg, about 740 mg, about 750 mg, about 760 mg, about 770 mg, about 780 mg, about 790 mg, about 800 mg, about 810 mg, about 820 mg, about 830 mg, about 840 mg, about 850 mg, about 860 mg, about 870 mg, about 880 mg, about 890 mg, about 900 mg, about 910 mg, about 920 mg, about 930 mg, about 940 mg, about 950 mg, about 960 mg, about 970 mg, about 980 mg, about 990 mg, or about 1000 mg per liter of host cell suspension. In embodiments, the yield of the first polypeptide when it is expressed as a fusion protein comprising a second polypeptide with phase behavior is at least about 1 mg, at least about 2 mg, at least about 3 mg, at least about 4 mg, at least about 5 mg, at least about 6 mg, at least about 7 mg, at least about 8 mg, at least about 9 mg, at least about 10 mg, at least about 11 mg, at least about 12 mg, at least about 13 mg, at least about 14 mg, at least about 15 mg, at least about 16 mg, at least about 17 mg, at least about 18 mg, at least about 19 mg, at least about 20 mg, at least about 21 mg, at least about 22 mg, at least about 23 mg, at least about 24 mg, at least about 25 mg, at least about 26 mg, at least about 27 mg, at least about 28 mg, at least about 29 mg, at least about 30 mg, at least about 31 mg, at least about 32 mg, at least about 33 mg, at least about 34 mg, at least about 35 mg, at least about 36 mg, at least about 37 mg, at least about 38 mg, at least about 39 mg, at least about 40 mg, at least about 41 mg, at least about 42 mg, at least about 43 mg, at least about 44 mg, at least about 45 mg, at least about 46 mg, at least about 47 mg, at least about 48 mg, at least about 49 mg, at least about 50 mg, at least about 51 mg, at least about 52 mg, at least about 53 mg, at least about 54 mg, at least about 55 mg, at least about 56 mg, at least about 57 mg, at least about 58 mg, at least about 59 mg, at least about 60 mg, at least about 61 mg, at least about 62 mg, at least about 63 mg, at least about 64 mg, at least about 65 mg, at least about 66 mg, at least about 67 mg, at least about 68 mg, at least about 69 mg, at least about 70 mg, at least about 71 mg, at least about 72 mg, at least about 73 mg, at least about 74 mg, at least about 75 mg, at least about 76 mg, at least about 77 mg, at least about 78 mg, at least about 79 mg, at least about 80 mg, at least about 81 mg, at least about 82 mg, at least about 83 mg, at least about 84 mg, at least about 85 mg, at least about 86 mg, at least about 87 mg, at least about 88 mg, at least about 89 mg, at least about 90 mg, at least about 91 mg, at least about 92 mg, at least about 93 mg, at least about 94 mg, at least about 95 mg, at least about 96 mg, at least about 97 mg, at least about 98 mg, at least about 99 mg, at least about 100 mg, at least about 110 mg, at least about 120 mg, at least about 130 mg, at least about 140 mg, at least about 150 mg, at least about 160 mg, at least about 170 mg, at least about 180 mg, at least about 190 mg, at least about 200 mg, at least about 210 mg, at least about 220 mg, at least about 230 mg, at least about 240 mg, at least about 250 mg, at least about 260 mg, at least about 270 mg, at least about 280 mg, at least about 290 mg, at least about 300 mg, at least about 310 mg, at least about 320 mg, at least about 330 mg, at least about 340 mg, at least about 350 mg, at least about 360 mg, at least about 370 mg, at least about 380 mg, at least about 390 mg, at least about 400 mg, at least about 410 mg, at least about 420 mg, at least about 430 mg, at least about 440 mg, at least about 450 mg, at least about 460 mg, at least about 470 mg, at least about 480 mg, at least about 490 mg, at least about 500 mg, at least about 510 mg, at least about 520 mg, at least about 530 mg, at least about 540 mg, at least about 550 mg, at least about 560 mg, at least about 570 mg, at least about 580 mg, at least about 590 mg, at least about 600 mg, at least about 610 mg, at least about 620 mg, at least about 630 mg, at least about 640 mg, at least about 650 mg, at least about 660 mg, at least about 670 mg, at least about 680 mg, at least about 690 mg, at least about 700 mg, at least about 710 mg, at least about 720 mg, at least about 730 mg, at least about 740 mg, at least about 750 mg, at least about 760 mg, at least about 770 mg, at least about 780 mg, at least about 790 mg, at least about 800 mg, at least about 810 mg, at least about 820 mg, at least about 830 mg, at least about 840 mg, at least about 850 mg, at least about 860 mg, at least about 870 mg, at least about 880 mg, at least about 890 mg, at least about 900 mg, at least about 910 mg, at least about 920 mg, at least about 930 mg, at least about 940 mg, at least about 950 mg, at least about 960 mg, at least about 970 mg, at least about 980 mg, at least about 990 mg, or at least about 1000 mg per liter of host cell suspension. In some embodiments, the yield of the first polypeptide is greater than 15 mg per liter, greater than 30 mg per liter, greater than 50 mg per liter, greater than 100 mg per liter, greater than 200 mg per liter, or greater than 200 mg per liter of host cell suspension. In embodiments, the yield of the first polypeptide is greater than 75 mg per liter of host cell suspension. Cell suspension may be referred to interchangeably with cell culture.

[0277] In some embodiments, the yield of the first polypeptide produced as a fusion protein comprising a second polypeptide with phase behavior is at least 2-fold, at least 3-fold, at least 4-fold, at least 5-fold, at least 6-fold, at least 7-fold, at least 8-fold, at least 9-fold, at least 10-fold, at least 50-fold, at least 100-fold, or more, than the yield of the first polypeptide not expressed as a fusion protein (i.e., expressed without being fused to a second polypeptide with phase behavior). In embodiments, the yield of the first polypeptide produced as a fusion protein comprising a second polypeptide with phase behavior is about 3-fold greater than the yield of the first polypeptide not expressed as a fusion protein.

[0278] In some embodiments, the yield of the first polypeptide produced as a fusion protein comprising a second polypeptide with phase behavior is at least about 50%, at least about 75%, at least about 100%, at least about 125%, at least about 150%, at least about 175%, at least about 200%, at least about 225%, at least about 250%, at least about 275%, at least about 300%, at least about 325%, at least about 350%, at least about 375%, at least about 400%, at least about 425%, at least about 450%, at least about 475%, at least about 500%, at least about 525%, at least about 550%, at least about 575%, at least about 600%, at least about 625%, at least about 650%, at least about 675%, at least about 700%, at least about 725%, at least about 750%, at least about 775%, at least about 800%, at least about 825%, at least about 850%, at least about 875%, at least about 900%, at least about 925%, at least about 950%, at least about 975%, at least about 1000%, at least about 1100%, at least about 1125%, at least about 1150%, at least about 1175%, at least about 1200%, at least about 1225%, at least about 1250%, at least about 1275%, at least about 1300%, at least about 1325%, at least about 1350%, at least about 1375%, at least about 1400%, at least about 1425%, at least about 1450%, at least about 1475%, at least about 1500%, at least about 1525%, at least about 1550%, at least about 1575%, at least about 1600%, at least about 1625%, at least about 1650%, at least about 1675%, at least about 1700%, at least about 1725%, at least about 1750%, at least about 1775%, at least about 1800%, at least about 1825%, at least about 1850%, at least about 1875%, at least about 1900%, at least about 1925%, at least about 1950%, at least about 1975%, or at least about 2000% higher than the yield of a first polypeptide when not expressed as a fusion protein, including all ranges and values therebetween. In embodiments, the yield of the first polypeptide is about 300% higher than the yield of a first polypeptide that is not expressed as a fusion protein.

### Methods for Purifying a First Polypeptide of a Fusion Protein

[0279] Also provided herein is a method for purifying a first polypeptide, the method comprising: i) providing a fusion protein comprising the first polypeptide and a second polypeptide having phase behavior; ii) applying a first environmental factor to reversibly aggregate the fusion protein; iii) separating the fusion protein aggregates from at least one contaminant; and iv) applying a second environmental factor to disaggregate the fusion protein. In some embodiments, the fusion protein is any fusion protein described herein.

[0280] In some embodiments, the at least one contaminant is a solvent, a protein, a peptide, a carbohydrate, a nucleic acid, a virus, a cell (e.g., a bacterial, yeast, or mammalian cell), a carbohydrate, a lipid, or a lipopolysaccharide. In some embodiments, the contaminant is an endotoxin or a mycotoxin.

[0281] Without being bound by theory, the application of a first environmental factor causes aggregation of the fusion protein via intermolecular interactions between the polypeptides with phase behavior, resulting in fusion protein aggregates. In some embodiments, an environmental factor causes the formation of fusion protein aggregates that are larger in size that the size of the fusion protein before introduction of the environmental factor. As used herein, the phrase “increase in size” may refer to an increase in the diameter of the fusion protein or an increase in the mass of the fusion protein. In some embodiments, the increase in size is an increase in the molar mass of the fusion protein. In some embodiments, the increase in size is an increase in the hydrodynamic radius of the fusion protein.

[0282] In some embodiments, the size increase is stabilized by non-covalent interactions between polypeptides with phase behavior. In some embodiments, the non-covalent interactions are dipole-dipole forces, van der Waals forces, London Dispersion forces, hydrogen bonding, hydrophobic interactions, and/or electrostatic interactions.

[0283] In some embodiments, the size of the fusion protein aggregates is at least about 2-fold, at least about 5-fold, at least about 10-fold, at least about 15-fold, at least about 20-fold, at least about 25-fold, at least about 30-fold, at least about 35-fold, at least about 40-fold, at least about 45-fold, at least about 50-fold, at least about 55-fold, at least about 60-fold, at least about 65-fold, at least about 70-fold, at least about 75-fold, at least about 80-fold, at least about 85-fold, at least about 90-fold, at least about 95-fold, at least about 100-fold, greater than the size of the fusion protein before introduction of the environmental factor. In some embodiments, the size of the fusion protein aggregates is at least 2-fold larger than the size of the fusion protein before introduction of the environmental factor. In some embodiments, the size of the fusion protein aggregates is at least 5-fold larger than the size of the fusion protein before introduction of the environmental factor. In some embodiments, the size of the fusion protein aggregates is at least 10-fold larger than the size of the fusion protein before introduction of the environmental factor. In some embodiments, the size of the fusion protein aggregates is at least 25-fold larger than the size of the fusion protein before introduction of the environmental factor.

[0284] In some embodiments, the increased size of the fusion protein aggregates compared to the fusion protein can be observed visually with an unaided eye. For example, the increased size may cause a composition comprising the complex to change color, clarity, viscosity, and/or may cause the complex to change solubility (e.g., to precipitate from solution), wherein such change is observable by a human without the use of any special equipment.

[0285] In some embodiments, a person of skill in the art may measure the increased size of the fusion protein aggregates according to known methods in the art. In some embodiments, the increased size can be measured utilizing a technique selected from the group consisting of x-ray scattering, small angle x-ray scattering, wide angle x-ray scattering, dynamic light scattering, analytical ultracentrifugation, size exclusion chromatography, and photon correlation spectroscopy.

[0286] In some embodiments, the environmental factor is an environmental described herein. For example, in some embodiments, the environmental factor is (a) a change in one or more of temperature, pH, salt concentration or pressure; (b) the addition of one or more surfactants, cofactors, vitamins, molecular crowding agents, enzymes, denaturing agents; or (c) the application of electromagnetic waves.

[0287] In some embodiments, the fusion protein aggregates are separated from one or more impurities by washing the fusion protein aggregates. In some embodiments, washing the fusion protein aggregates does not interfere with aggregation of the fusion protein. In some embodiments, the fusion protein aggregates are washed with a buffer. Non-limiting examples of buffers include sodium acetate, saline, glycine-HCL, cacodylate buffer, Tris-HCl, 4-(2-hydroxyethyl)-1-piperazineethanesulfonic acid (HEPES), 2-(N-morpholino)ethanesulfonic acid (MES), 3-(N-morpholino)propanesulfonic acid (MOPS), citrate, phosphate buffer, tris(hydroxymethyl)methylamino]propanesulfonic acid (TAPS), and tris(hydroxymethyl)aminomethane (Tris). In some embodiments, the buffer comprises one or more of arginine, histidine, urea, pluronic acid, and triton-x-100. In some embodiments, the AAV-purification matrix complex is washed with a solvent. Non-limiting examples of solvents include acetone, acetonitrile, dimethylformamide, water, ethanol, toluene, methyl acetate, and ethyl acetate.

[0288] In some embodiments, the fusion protein aggregates are separated from at least one impurity on the basis of size. In some embodiments, the fusion protein aggregates are separated from at least one impurity on the basis of diameter. In some embodiments, the fusion protein aggregates are separated from at least one impurity on the basis of radius. In some embodiments, the fusion protein aggregates are separated from at least one impurity on the basis of mass. In some embodiments, the fusion protein aggregates are separated from at least one impurity on the basis of molar mass. In some embodiments, the AAV-purification matrix is fusion protein aggregates are separated from at least one impurity on the basis of size by using a technique selected from the group consisting of centrifugation, tangential flow filtration, analytical ultracentrifugation, membrane chromatography, high performance liquid chromatography, size exclusion chromatography, normal flow filtration, acoustic wave separation, centrifugation, counterflow centrifugation, and fast protein liquid chromatography.

[0289] In some embodiments, the separation is achieved using acoustic wave separation. In some embodiments, the acoustic waves have a frequency between about 1 Hz and 2000 kHz. In some embodiments, the acoustic waves have a frequency of about 1 Hz, about 5 Hz, about 10 Hz, about 20 Hz, about 30 Hz, about 40 Hz, about 50 Hz, about 60 Hz, about 70 Hz, about 80 Hz, about 90 Hz, about 100 Hz, about 200 Hz, about 300 Hz, about 400 Hz, about 500 Hz, about 600 Hz, about 700 Hz, about 800 Hz, about 900 Hz, about 1 kHz, about 100 kHz, about 200 kHz, about 300 kHz, about 400 kHz, about 500 kHz, about 600 kHz, about 700 kHz, about 800 kHz, about 900 kHz, about 1000 kHz, about 1100 kHz, about 1200 kHz, about 1300 kHz, about 1400 kHz, about 1500 kHz, about 1600 kHz, about 1700 kHz, about 1800 kHz, about 1900 kHz, or about 2000 kHz.

[0290] In some embodiments, the fusion protein aggregates are separated from at least one impurity on the basis of size using centrifugation. In some embodiments, between about 100 relative centrifugal force (RCF) and about 16,000 RCF, for example, about 500 to about 16,000 RCF, about 1,000 RCF to 16,000 RCF, are applied to separate the fusion protein aggregates from at least one impurity. In some embodiments, at least 500 relative centrifugal force (RCF) are applied to separate the fusion protein aggregates from at least one impurity, for example, at least about 500 RCF, at least about 600 RCF, at least about 700 RCF, at least about 800 RCF, at least about 900 RCF, at least about 1000 RCF, at least about 2000 RCF, at least about 3000 RCF, at least about 3500 RCF, at least about 4000 RCF, at least about 5000 RCF, at least about 6000 RCF, at least about 7000 RCF, at least about 8000 RCF, at least about 9000 RCF, at least about 10,000 RCF, at least about 11,000 RCF, at least about 12,000 RCF, at least about 13,000 RCF, at least about 14,000 RCF, at least about 15,000 RCF, at least about 16,000 RCF, at least about 17,000 RCF, at least about 18,000 RCF, at least about 19,000 RCF, or at least about 20,000 RCF.

[0291] In some embodiments, the fusion protein aggregates are separated from at least one impurity on the basis of size by using TFF. In some embodiments, TFF may be used to separate the fusion protein aggregates from at least one impurity on the basis of size, a process also referred to herein as “diafiltration.” Diafiltration comprises both washing and elution steps. Washing removes impurities contained in the composition comprising the fusion protein aggregates. Elution separates purified first polypeptide from the second polypeptide. In some embodiments, the fusion protein aggregates are concentrated using TFF. In some embodiments, TFF may be used to increase the concentration of fusion protein aggregates within a composition, a process also referred to herein as “concentration.”

[0292] Tangential flow filtration employs both microfiltration and ultrafiltration membranes to separate and/or concentrate molecules. Microfiltration membranes typically have pore sizes between 0.1 μm and 10 μm. Ultrafiltration membranes typically have smaller pore sizes than microfiltration membranes with pore sizes between 0.001 μm and 0.1 μm. In some embodiments, a membrane with a pore size between about 0.001 μm and about 10 μm is utilized in the methods of the disclosure. In some embodiments, the membrane has a pore size of about 0.001 μm, about 0.01 μm, about 0.05 μm, about 0.1 μm, about 0.2 μm, about 0.3 μm, about 0.4 μm, about 0.5 μm, about 0.6 μm, about 0.7 μm, about 0.8 μm, about 0.9 μm, about 1.0 μm, about 2 μm, about 3 μm, about 4 μm, about 5 μm, about 6 μm, about 7 μm, about 8 μm, about 9 μm, or about 10 μm, including all values and ranges in between thereof. In some embodiments, the membrane has a pore size of about 0.1 μm. In some embodiments, the membrane has a pore size of about 0.2 μm.

[0293] In some embodiments, the membrane is made of hydrophilized poly(vinylildene difluoride) (PVDF), polyetheresulfone (PES), cellulose phosphate, diethylaminoethyl cellulose, polysufone, regenerated cellulose, nylon, cellulose nitrate, cellulose acetate, pegylated PES, and sulfonated PES.

[0294] In TFF, a membrane is placed tangentially to the flow of a fluid mixture to cause the fluid mixture to flow tangentially over a first side of the membrane. At the same time, a fluid media is placed in contact with a second surface of the membrane. A transmembrane pressure is the force that drives fluid through the membrane, carrying along permeable molecules.

[0295] In some embodiments, separation of fusion protein aggregates from the one or more contaminants or impurities on the basis of size is performed using TFF with a transmembrane pressure of between about 0.1 bar to about 3 bar. In some embodiments, the transmembrane pressure is about 0.1 bar, about 0.2 bar, about 0.3 bar, about 0.4 bar, about 0.5 bar, about 0.6 bar, about 0.7 bar, about 0.8 bar, about 0.9 bar, about 1.0 bar, about 1.1 bar, about 1.2 bar, about 1.3 bar, about 1.4 bar, about 1.5 bar, about 1.6 bar, about 1.7 bar, about 1.8 bar, about 1.9 bar, about 2.0 bar, about 2.1 bar, about 2.2 bar, about 2.3 bar, about 2.4 bar, about 2.5 bar, about 2.6 bar, about 2.7 bar, about 2.8 bar, about 2.9 bar, or about 3.0 bar, including all values and ranges in between thereof. In some embodiments, the transmembrane pressure is about 1.5 bar.

[0296] In some embodiments, the cross flow rate is tuned to improve the separation of the fusion protein aggregates described herein from the one or more contaminants. The cross flow rate is the rate of solution flow through the feed channel and across the membrane. It provides the force that sweeps away molecules that can restrict filtrate flow. In some embodiments, the cross flow rate is between about 500 L/m2/h and about 2000 L/m2/h. In some embodiments, the cross flow rate is between about 500 L/m2/h, about 600 L/m2/h, about 700 L/m2/h, about 800 L/m2/h, about 900 L/m2/h, about 1000 L/m2/h, about 1100 L/m2/h, about 1200 L/m2/h, about 1300 L/m2/h, about 1400 L/m2/h, about 1500 L/m2/h, about 1600 L/m2/h, about 1700 L/m2/h, about 1800 L/m2/h, about 1900 L/m2/h, or about 2000 L/m2/h, including all values and ranges in between thereof. In some embodiments, the cross flow rate is about 960 L/m2/h. In some embodiments, TFF separation occurs by using a membrane that retains the fusion protein aggregates while passing the contaminant.

[0297] In some embodiments, after separation of the fusion protein aggregates from the at least one contaminant, the first polypeptide is separated from the second polypeptide. In some embodiments, the first polypeptide is separated from the second polypeptide by introducing an enzyme that cleaves an amide bond separating the first polypeptide from the second polypeptide. In some embodiments, the enzyme is a protease.

[0298] In some embodiments, after separation of the fusion protein aggregates are separated from the at least one contaminant, an environmental factor is applied to disaggregate the fusion protein aggregates. The environmental factor applied to disaggregate the fusion protein aggregates may be any of the environmental factors described herein.

[0299] In some embodiments, after separation of the fusion protein aggregates from at least one impurity, the first polypeptide is eluted as a fusion protein comprising a first polypeptide and a second polypeptide with phase behavior. In some embodiments, the first polypeptide is eluted as a disaggregated fusion protein comprising the first polypeptide and a second polypeptide with phase behavior.

[0300] In some embodiments, the environmental factor comprises changing the pH of the composition comprising the first polypeptide. In some embodiments, the pH is increased by about 0.1, about 0.2, about 0.3, about 0.4, about 0.5, about 0.6, about 0.7, about 0.8, about 0.9, about 1.0, about 1.1, about 1.2, about 1.3, about 1.4, about 1.5, about 1.6, about 1.7, about 1.8, about 1.9, about 2.0, about 2.1, about 2.2, about 2.3, about 2.4, about 2.5, about 2.6, about 2.7, about 2.8, about 2.9, about 3.0, about 3.1, about 3.2, about 3.3, about 3.4, about 3.5, about 3.6, about 3.7, about 3.8, about 3.9, about 4.0, about 4.1, about 4.2, about 4.3, about 4.4, about 4.5, about 4.6, about 4.7, about 4.8, about 4.9, about 5.0, about 5.1, about 5.2, about 5.3, about 5.4, about 5.5, about 5.6, about 5.7, about 5.8, about 5.9, or about 6.0 units. In some embodiments, the pH is decreased by about 0.1, about 0.2, about 0.3, about 0.4, about 0.5, about 0.6, about 0.7, about 0.8, about 0.9, about 1.0, about 1.1, about 1.2, about 1.3, about 1.4, about 1.5, about 1.6, about 1.7, about 1.8, about 1.9, about 2.0, about 2.1, about 2.2, about 2.3, about 2.4, about 2.5, about 2.6, about 2.7, about 2.8, about 2.9, about 3.0, about 3.1, about 3.2, about 3.3, about 3.4, about 3.5, about 3.6, about 3.7, about 3.8, about 3.9, about 4.0, about 4.1, about 4.2, about 4.3, about 4.4, about 4.5, about 4.6, about 4.7, about 4.8, about 4.9, about 5.0, about 5.1, about 5.2, about 5.3, about 5.4, about 5.5, about 5.6, about 5.7, about 5.8, about 5.9, or about 6.0 units. In some embodiments, the purified fusion protein aggregates at a pH of about 2. In some embodiments, the fusion protein is purified at a pH of about 3.

[0301] In some embodiments, the environmental factor comprises changing the temperature of the composition comprising the fusion protein. In some embodiments, the temperature is increased 0.5° C., about 1° C., about 2° C., about 3° C., about 4° C., about 5° C., about 6° C., about 7° C., about 8° C., about 9° C., about 10° C., about 11° C., about 12° C., about 13° C., about 14° C., about 15° C., about 16° C., about 17° C., about 18° C., about 19° C., about 20° C., about 21° C., about 22° C., about 23° C., about 24° C., about 25° C., about 26° C., about 27° C., about 28° C., about 29° C., about 30° C., about 31° C., about 32° C., about 33° C., about 34° C., about 35° C., about 36° C., about 37° C., about 38° C., about 39° C., or about 40° C. In some embodiments, the temperature is decreased about 0.5° C., about 1° C., about 2° C., about 3° C., about 4° C., about 5° C., about 6° C., about 7° C., about 8° C., about 9° C., about 10° C., about 11° C., about 12° C., about 13° C., about 14° C., about 15° C., about 16° C., about 17° C., about 18° C., about 19° C., about 20° C., about 21° C., about 22° C., about 23° C., about 24° C., about 25° C., about 26° C., about 27° C., about 28° C., about 29° C., about 30° C., about 31° C., about 32° C., about 33° C., about 34° C., about 35° C., about 36° C., about 37° C., about 38° C., about 39° C., or about 40° C.

[0302] In some embodiments, the environmental factor comprises changing the ionic strength of the composition comprising the fusion protein. In some embodiments, the change in ionic strength is brought about by increasing the concentration of salt. In some embodiments, the change in ionic strength is brought about by decreasing the concentration of salt. Non-limiting examples of salts include sodium chloride, potassium chloride, ammonium chloride, sodium acetate, sodium citrate, glycine, arginine, copper sulfate, sodium iodide, ammonium sulfate, and sodium sulfate. In some embodiments, a dialysis is used to change the concentration of salt in the composition comprising the fusion protein, contaminant, and/or molecule.

[0303] In some embodiments, the environmental factor comprises addition of a reducing agent to the composition comprising the fusion protein. In some embodiments, the one or more reducing agents is selected from the group consisting of dithiothreitol (DTT), 2-mercaptoethanol (BME), Tris (2-carboxyethyl) phosphine (TCEP), hydrazine, boron hydrides, amine boranes, lower alkyl substituted amine boranes, triethanolamine, and N,N,N′,N′-tetramethylethylenediamine (TEMED).

[0304] In some embodiments, the method of purifying a fusion protein comprising a first polypeptide described herein is completed in about 30 minutes to about 24 hours. In some embodiments, the methods described herein are completed in about 30 minutes to about 24 hours. In some embodiments, the methods are completed in about 30 minutes, about 1 hr, about 2 hr, about 3 hr, about 4 hr, about 5 hr, about 6 hr, about 7 hr, about 8 hr, about 9 hr, about 10 hr, about 11 hr, about 12 hr, about 13 hr, about 14 hr, about 15 hr, about 16 hr, about 17 hr, about 18 hr, about 19 hr, about 20 hr, about 21 hr, about 22 hr, about 23 hr, or about 24 hr. In some embodiments, the method of purifying a fusion protein and/or first polypeptide described herein is completed in about 2 hours to about 10 hours.

[0305] In some embodiments, after purification of the fusion protein, the first polypeptide is separated from the second polypeptide. In some embodiments, the first polypeptide is separated from the second polypeptide by introducing an enzyme that cleaves an amide bond separating the first polypeptide from the second polypeptide. In some embodiments, the enzyme is a protease.

[0306] In some embodiments, the purification yield of the fusion protein and/or the first polypeptide is at least 70%, at least 80%, at least 90%, at least 95%, at least 96%, at least 97%, at least 98%, or at least 99%.

[0307] In some embodiments, the fusion protein and/or the first polypeptide is purified to at least 70%, at least 80%, at least 90%, at least 95%, at least 96%, at least 97%, at least 98%, or at least 99% purity.

[0308] In some embodiments, the methods described herein enable the purification of at least 0.1 kg, at least about 0.2 kg, at least about 0.3 kg, at least about 0.4 kg, at least about 0.5 kg, at least about 0.6 kg, at least about 0.7 kg, at least about 0.8 kg, at least about 0.9 kg, at least about 1 kg, at least about 2 kg, at least about 3 kg, at least about 4 kg, at least about 5 kg, at least about 6 kg, at least about 7 kg, at least about 8 kg, at least about 9 kg, at least about 10 kg, or more of fusion protein and/or the first polypeptide per day, including all values and ranges in between thereof.

### Methods for Performing an Enzymatic Process on a Nucleic Acid Substrate

[0309] The fusion proteins may be used to perform enzymatic processes on a nucleic acid substrate, in a controlled fashion. In some embodiments, the first protein of the fusion protein is an enzyme, or a catalytic fragment or derivative thereof. For example, the process may be performed in a two-phase composition. In such a composition, the substrate may be present in a first phase, and the fusion protein may be present in a second phase. When desired, an environmental factor may be applied, which causes the fusion protein to enter the first phase, thereby coming into contact with a substrate. In some embodiments, a second environmental factor may be applied, which causes the fusion protein to leave the first phase, so that it may no longer contact the substrate. This process may be used to perform multi-step enzymatic processes on a substrate, in a controlled fashion. For example, two-phase composition may be provided wherein the substrate is present in a first phase, and a plurality of fusion proteins may be present in the second phase. The plurality of fusion proteins comprise fusion proteins comprising different phase behaviors. When desired, a first environmental factor may be applied, which causes one or more fusion proteins to contact and/or be removed from contacting the substrate. Additionally, a second environmental factor, which causes one or more additional fusion proteins to contact and/or be removed from the substrate. Such processes may be useful for synthesis of biologics of interest, such as in vitro transcription of RNA.

[0310] In embodiments, the nucleic acid substrate is DNA or RNA. In embodiments, the DNA or RNA is single stranded. In embodiments, the DNA or RNA is double stranded. In embodiments, the nucleic acid is RNA, and the RNA is selected from messenger RNA (mRNA), transfer RNA (tRNA), microRNA, or ribosomal RNA (rRNA). In embodiments, the mRNA is a small RNA. Small RNA comprise from about 18 to about 30 nucleotides, for example, about 18, 19, 20, 21, 22, 23, 24, 25, 26, 27, 28, 29, or 30 nucleotides.

[0311] In embodiments, the enzyme is any one of the NBP described herein. In embodiments, the NBP is selected from a T7 RNA polymerase, Rnase inhibitor, 2′-O-Methyltransferase, Inorganic Pyrophosphatase, Poly(A) Polymerase, DNase I, Calf intestinal phosphatase, Antarctic phosphatase, D1 subunit of the Vaccinia virus mRNA capping enzyme, Guanine-7-methyltransferase (found in D1 subunit of the Vaccinia virus mRNA capping enzyme), Guanylyltransferase (found in D1 subunit of the Vaccinia virus mRNA capping enzyme), RNA triphosphatase (found in D1 subunit of the Vaccinia virus mRNA capping enzyme), and D12 subunit of vaccinia virus mRNA capping enzyme, a stem-loop binding protein, a heterogenous ribonucleoprotein (hnRNP), GroEL, Edc3, DHX9, Xrn1, Dcp1, Dcp2, LAF-1, MEG-1, MEG-3, ASF/SF2 splicing factor, serine/arginine rich splicing factor 4 (SRp75), the serine and arginine rich splicing factor 1 (SRSF1), the L3 ribosomal protein, the L4 ribosomal protein, the L13 ribosomal protein, the L20 ribosomal protein, the L22 ribosomal protein, the L24 ribosomal protein, the L24e ribosomal protein, the S12 ribosomal protein, the S14 ribosomal protein, and the eukaryotic initiation factor 4E-binding protein 1 (4EBP1), Tat, Rev, RSG-1.2 peptide, poly(A)-binding protein (PABP), eukaryotic translation initiation factor 4E (eIF4E), eukaryotic translation initiation factor3 Subunit D (eIF3D), heterogenous nuclear ribonucleoproteins (hnRNPs), RNA-specific adenosine deaminase 1 (ADAR1), RNA-specific adenosine deaminase 2 (ADAR2), CspB from Bacillus subtilis (Bscscp), Y-box protein 1 cold shock domain (YB1-CSD), a Fox-1 protein (FOX1), poly(A)-binding protein (PABP), Staufen protein, TIS11d, zinc finger protein (ZNF), Z-DNA binding protein 1 (ZBP1), retinoic acid-inducible gene-I (RIG-I) like protein, toll like receptor 7 (TLR7), toll like receptor 8 (TLR3), toll like receptor 8 (TLR8), retinoic acid-inducible gene I (RIG-I), melanoma differentiation-associated protein 5 (MDA5), interferon induced protein with tetratricopeptide repeats 1 (IFIT1), protein kinase R (PKR), an oligoadenylate synthase-like (OASL) protein (e.g., OAS1, OAS2, OAS3, or OASL), ribonuclease E (RNASE E), gamma-interferon-inducible protein Ifi-16 (IF116), cyclic GMP-AMP synthase (cGAS), or a catalytic fragment thereof.

[0312] In embodiments, the NBP comprises one or more of the following domains: a short linear motif (SLIM), an RG[G] repeat, an RGG repeat, a RS/RG rich domain, a K/R basic patch, a molecular recognition feature, a low complexity sequence, an RNA recognition motif, a double-stranded RNA binding domain, a K homology domain, a zinc finger domain (e.g., CCHH ZF domain, a CCCC (Ran-BP2) domain, a CCCH ZF domain), an RGG domain, a Pumillo family domain, a pentatricopeptide domain, a cold shock domain, a helicase domain, a La motif, a Piwi-Argonaute-Zwille (PAZ) domain, a P-element induced wimpy testis, a pseudouridine synthase and archaeosine transglycosylate (PUA), a Pumillo-like repeat (PUM), a ribosomal S1-like (S1), Sm and Like-Sm (Sm/Lsm) repeat, thiouridine synthases and RNA methylases and pseudouridine synthases (THUMP), or a domain with YT521-B homology.

[0313] In embodiments, the polypeptide with phase behavior is any polypeptide with phase behavior described herein.

[0314] In some embodiments, a method for performing an enzymatic process on a substrate, comprises i) providing a first fusion protein comprising a first enzyme and a polypeptide having a first phase behavior; and ii) applying a first environmental factor, which allows the first enzyme to contact the substrate. In some embodiments, the method further comprises an additional environmental factor, which separates the first enzyme from the substrate.

[0315] In some embodiments, a method for performing a multi-step enzymatic process on a substrate, comprises i) providing a first fusion protein comprising a first enzyme and a polypeptide having a first phase behavior; ii) providing a second fusion protein comprising a second enzyme and polypeptide having a second phase behavior; iii) applying a first environmental factor, which allows the first enzyme to contact the substrate; and iv) applying a second environmental factor, which allows the second enzyme to contact the substrate. In some embodiments, the method further comprises v) applying a third environmental factor, which separates the first enzyme from the substrate. In some embodiments, the method further comprises and vi) applying a fourth environmental factor, which separates the second enzyme from the substrate.

[0316] In some embodiments, the method further comprises providing additional fusion proteins, for example, a third fusion protein, a fourth fusion protein, a fifth fusion protein, and so on. Each additional fusion protein comprises an additional enzyme and polypeptide with phase behavior. For example, a third fusion protein comprises a third enzyme and a polypeptide having a third phase behavior. In some embodiments, a plurality of fusion proteins is provided wherein each fusion protein comprises a different enzyme, but at least two of the fusion proteins comprise a polypeptide with the same phase behavior.

[0317] In some embodiments, provided herein is a method for performing a multi-step enzymatic process on a substrate, comprising: i) providing a first fusion protein comprising a first enzyme and a polypeptide having a first phase behavior; ii) providing a second fusion protein comprising a second enzyme and polypeptide having a second phase behavior; iii) applying a first environmental factor, which allows the first enzyme to contact, isolate, and/or concentrate the substrate; and iv) applying a second environmental factor, which allows the second enzyme to contact, isolate, and/or concentrate the substrate. In some embodiments, provided herein is a method for contacting, isolating, and/or purifying a substrate, the method comprising: i) providing a first fusion protein comprising a first enzyme and a polypeptide having a first phase behavior; ii) providing a second fusion protein comprising a second enzyme and polypeptide having a second phase behavior; iii) applying a first environmental factor, which allows the first enzyme to contact, isolate, and/or concentrate the substrate; and iv) applying a second environmental factor, which allows the second enzyme to contact, isolate, and/or concentrate the substrate. In some embodiments, the methods described herein allow the formation of concentrated droplets comprising the fusion protein and substrate. For example, in some embodiments, addition of a salt to a composition comprising (i) a fusion protein comprising the enzyme polyadenylate polymerase and a polypeptide with phase behavior, (ii) an mRNA substrate, and (iii) poly(adenylate)nucleotide results in the formation of a concentrated droplet. In some embodiments, the polyadenylate polymerase adds the poly(adenylate) nucleotide to the mRNA substrate in the concentrated droplet.

[0318] In some embodiments, the method comprises incubating a fusion protein comprising an enzyme and a polypeptide with phase behavior with a substrate. In some embodiments, the fusion protein is incubated with the substrate for between about 10 minutes to about 24 hours, for example, about 10 minutes, about 15 minutes, about 20 minutes, about 25 minutes, about 30 minutes, about 35 minutes, about 40 minutes, about 45 minutes, about 50 minutes, about 55 minutes, or about 60 minutes about 1 hour, about 2 hours, about 3 hours, about 4 hours, about 5 hours, about 6 hours, about 7 hours, about 8 hours, about 9 hours, about 10 hours, about 11 hours, about 12 hours, about 13 hours, about 14 hours, about 15 hours, about 16 hours, about 17 hours, about 18 hours, about 19 hours, about 20 hours, about 21 hours, about 22 hours, about 23 hours, or about 24 hours, including all ranges in between. In some embodiments, the fusion protein is incubated with the substrate for between about 1 and about 4 hours. In some embodiments, the fusion protein is incubated with the substrate for between about 10 minutes and about 1 hour.

[0319] In some embodiments, incubation occurs at a temperature between about 10° C. and about 80° C. for example, at about 10° C., 15° C., 16° C., 20° C., 25° C., 30° C., 35° C., 37° C., about 40° C., about 45° C., about 50° C., about 55° C., about 60° C., about 65° C., about 70° C., about 75° C., or about 80° C.

[0320] In some embodiments, introduction of an environmental factor provides the enzyme of a fusion protein comprising a polypeptide with phase behavior access to the substrate. For example, introduction of an environmental factor solubilizes the fusion protein and allows reaction between an enzyme and substrate to occur. In some embodiments, introduction of an environmental factor prevents the enzyme's access to the substrate. For example, introduction of an environmental factor may precipitate the fusion protein.

[0321] In some embodiments, a fusion protein is separated from the substrate. In some embodiments, separation occurs on the basis of size and/or density, for example, based on molecular weight or diameter. In some embodiments, any of the techniques described herein for separating molecules on the basis of size may be applied to separate a fusion protein from the substrate. In some embodiments, continuous centrifugation, tangential flow filtration, or centrifugation are used to separate a fusion protein from the substrate on the basis of size.

[0322] In some embodiments, the multi-step enzymatic process is in vitro transcription, and the substrate is DNA. In some embodiments, the DNA is linear DNA or circular DNA. In some embodiments, the first enzyme of the first fusion protein comprises RNA polymerase. In some embodiments, the RNA polymerase is T7, T3, or SP6 RNA polymerase. In some embodiments, the first fusion protein is added to a composition comprising the DNA substrate. In some embodiments, the composition also comprises ribonucleotide triphosphates and/or a buffer (e.g., a buffer comprising dithiothreitol and magnesium). In some embodiments, an environmental factor is added to provide the first enzyme (e.g., RNA polymerase) access to the DNA substrate. In some embodiments, the fusion protein and DNA substrate are incubated for about 10 minutes to about 24 hours. In some embodiments, incubation of RNA polymerase with a DNA substrate results in the production of RNA. In some embodiments, the first fusion protein is separated from the substrate via application of an environmental factor. In some embodiments, any method described herein for separating molecules on the basis of size is used to separate the RNA from the first fusion protein.

[0323] In some embodiments, the RNA produced after reaction with the first enzyme of the first fusion protein is used as a substrate for additional enzymatic reactions. For example, in some embodiments, a second fusion protein comprising the second enzyme mRNA Cap 2′-O-Methyltransferase and a polypeptide with phase behavior is provided to the RNA. This reaction results in the RNA containing a methyl group at the 5′ end. In some embodiments, the second fusion protein and RNA substrate are incubated for about 10 minutes to about 24 hours. In some embodiments, the second fusion protein is separated from the substrate via application of an environmental factor. In some embodiments, any method described herein for separating molecules on the basis of size is used to separate the capped mRNA from the second fusion protein.

[0324] In some embodiments, a second fusion protein comprising the second enzyme polyadenylate polymerase is added to an RNA substrate. In some embodiments, the composition comprising the RNA substrate comprises poly(adenylate)nucleotide. In some embodiments, the composition comprising the RNA comprises polyadenylate polymerase. Polyadenylate polymerase catalyzes the addition of a poly(A) tail to RNA. In some embodiments, the second fusion protein and RNA substrate are incubated for about 10 minutes to about 24 hours. In some embodiments, the second fusion protein is separated from the substrate via application of an environmental factor. In some embodiments, any method described herein for separating molecules on the basis of size is used to separate the RNA containing a poly(A) tail from the second fusion protein.

[0325] In some embodiments, a second fusion protein comprising the second enzyme PABP is added to an RNA substrate. In some embodiments, the composition comprising the RNA substrate comprises poly(adenylate)nucleotide. In some embodiments, the composition comprising the RNA comprises polyadenylate polymerase. PABP assists with the addition of a poly(A) tail to RNA. In some embodiments, the second fusion protein and RNA substrate are incubated for about 10 minutes to about 24 hours. In some embodiments, the second fusion protein is separated from the substrate via application of an environmental factor. In some embodiments, any method described herein for separating molecules on the basis of size is used to separate the RNA containing a poly(A) tail from the second fusion protein.

### Environmental Factors

[0326] In some embodiments, the methods of the disclosure provide one or more environmental factors to a composition comprising a fusion protein described herein. In some embodiments, one or more environmental factors are applied to reversibly aggregate the fusion protein. Application of an environmental factor causes a change in the composition comprising the fusion protein. In some embodiments, an environmental factor is used to reversibly aggregate the fusion protein. In some embodiments, an environmental factor is used to reversibly disaggregate the fusion protein. In some embodiments, the environmental factor is used to separate a fusion protein from one or more impurities in the composition comprising the fusion protein. In some embodiments, the one or more environmental factors cause the size of the fusion protein aggregates to increase. In some embodiments, the one or more environmental factors enables the first polypeptide of the fusion protein to retain its structure, function, and activity. In some embodiments, the one or more environmental factors enables the first polypeptide of the fusion protein to enhance its native structure, function, and activity.

[0327] In some embodiments, the methods of the disclosure comprise applying at least 1, at least 2, at least 3, at least 4, at least 5, at least 6, at least 7, at least 8, at least 9, or at least 10 environmental factors to a composition comprising at least 1, at least 2, at least 3, at least 4, at least 5, at least 6, at least 7, at least 8, at least 9, or at least 10 fusion proteins.

[0328] In some embodiments, the environmental factor is a change in temperature. In some embodiments, the temperature is increased by about 0.5° C., about 1° C., about 2° C., about 3° C., about 4° C., about 5° C., about 6° C., about 7° C., about 8° C., about 9° C., about 10° C., about 11° C., about 12° C., about 13° C., about 14° C., about 15° C., about 16° C., about 17° C., about 18° C., about 19° C., about 20° C., about 21° C., about 22° C., about 23° C., about 24° C., about 25° C., about 26° C., about 27° C., about 28° C., about 29° C., about 30° C., about 31° C., about 32° C., about 33° C., about 34° C., about 35° C., about 36° C., about 37° C., about 38° C., about 39° C., or about 40° C. In some embodiments, the temperature is decreased by about 0.5° C., about 1° C., about 2° C., about 3° C., about 4° C., about 5° C., about 6° C., about 7° C., about 8° C., about 9° C., about 10° C., about 11° C., about 12° C., about 13° C., about 14° C., about 15° C., about 16° C., about 17° C., about 18° C., about 19° C., about 20° C., about 21° C., about 22° C., about 23° C., about 24° C., about 25° C., about 26° C., about 27° C., about 28° C., about 29° C., about 30° C., about 31° C., about 32° C., about 33° C., about 34° C., about 35° C., about 36° C., about 37° C., about 38° C., about 39° C., or about 40° C.

[0329] In some embodiments, the environmental factor is a change in pH. In some embodiments, the pH is increased by about 0.1, about 0.2, about 0.3, about 0.4, about 0.5, about 0.6, about 0.7, about 0.8, about 0.9, about 1.0, about 1.1, about 1.2, about 1.3, about 1.4, about 1.5, about 1.6, about 1.7, about 1.8, about 1.9, about 2.0, about 2.1, about 2.2, about 2.3, about 2.4, about 2.5, about 2.6, about 2.7, about 2.8, about 2.9, about 3.0, about 3.1, about 3.2, about 3.3, about 3.4, about 3.5, about 3.6, about 3.7, about 3.8, about 3.9, about 4.0, about 4.1, about 4.2, about 4.3, about 4.4, about 4.5, about 4.6, about 4.7, about 4.8, about 4.9, about 5.0, about 5.1, about 5.2, about 5.3, about 5.4, about 5.5, about 5.6, about 5.7, about 5.8, about 5.9, or about 6.0 units.

[0330] In some embodiments, the pH is decreased by about 0.1, about 0.2, about 0.3, about 0.4, about 0.5, about 0.6, about 0.7, about 0.8, about 0.9, about 1.0, about 1.1, about 1.2, about 1.3, about 1.4, about 1.5, about 1.6, about 1.7, about 1.8, about 1.9, about 2.0, about 2.1, about 2.2, about 2.3, about 2.4, about 2.5, about 2.6, about 2.7, about 2.8, about 2.9, about 3.0, about 3.1, about 3.2, about 3.3, about 3.4, about 3.5, about 3.6, about 3.7, about 3.8, about 3.9, about 4.0, about 4.1, about 4.2, about 4.3, about 4.4, about 4.5, about 4.6, about 4.7, about 4.8, about 4.9, about 5.0, about 5.1, about 5.2, about 5.3, about 5.4, about 5.5, about 5.6, about 5.7, about 5.8, about 5.9, or about 6.0 units.

[0331] In some embodiments, the environmental factor is change in ionic strength. In some embodiments, the change in ionic strength is brought about by increasing the concentration of salt. In some embodiments, the change in ionic strength is brought about by decreasing the concentration of salt. Non-limiting examples of salts include sodium chloride, potassium chloride, magnesium chloride, calcium chloride ammonium chloride, sodium acetate, sodium citrate, copper sulfate, sodium iodide, and sodium sulfate. In some embodiments, the salt has a concentration of between about 0.1 M and about 5 M, for example, about 0.1 M, about 0.2 M, about 0.3 M, about 0.4 M, about 0.5 M, about 0.6 M, about 0.7 M, about 0.8 M, about 0.9 M, about 1 M, about 1.1 M, about 1.2 M, about 1.3 M, about 1.4 M, about 1.5 M, about 1.6 M, about 1.7 M, about 1.8 M, about 1.9 M, about 2 M, about 2.1 M, about 2.2 M, about 2.3 M, about 2.4 M, about 2.5 M, about 2.6 M, about 2.7 M, about 2.8 M, about 2.9 M, about 3 M, about 3.1 M, about 3.2 M, about 3.3 M, about 3.4 M, about 3.5 M, about 3.6 M, about 3.7 M, about 3.8 M, about 3.9 M, about 4 M, about 4.1 M, about 4.2 M, about 4.3 M, about 4.4 M, about 4.5 M, about 4.6 M, about 4.7 M, about 4.8 M, about 4.9 M, or about 5 M. In some embodiments, the salt has a concentration of 0.6 M. In some embodiments, dialysis is used to change the concentration of salt in the composition comprising the protein-based purification matrix and biologic, contaminant, and/or molecule.

[0332] In some embodiments, the environmental factor is the addition of a cofactor. Non-limiting examples of cofactors include calcium, magnesium, cobalt, copper, zinc, iron, manganese, selenium, molybdenum, potassium, coenzyme A (CoA), a nucleoside triphosphate, and a vitamin (e.g., vitamin A, B, C, D, or F). In some embodiments, the cofactor is calcium. In some embodiments, the nucleoside triphosphate is adenosine triphosphate, uridine triphosphate, guanosine triphosphate, cytidine triphosphate, or thymidine triphosphate. In some embodiments, the vitamin is a fat-soluble. In some embodiments, the vitamin is water-soluble. Non-limiting examples of vitamins include vitamin A, vitamin B1 (thiamine), vitamin B2 (riboflavin), vitamin B3 (niacin or niacinamide), vitamin B5 (pantothenic acid), Vitamin B6 (pyridoxine, pyridoxal, or pyridoxamine, or pyridoxine hydrochloride), vitamin B7 (biotin), vitamin B9 (folic acid), vitamin B12, vitamin C, vitamin D, Vitamin E, vitamin K, K1, and K2, folic acid, and biotin.

[0333] In some embodiments, the environmental factor is a change in the concentration of the protein-based purification matrix. In some embodiments, the environmental factor is a change in the concentration of the biologic, contaminant, and/or molecule.

[0334] In some embodiments, the environmental factor is a change in pressure of the composition comprising the protein-based purification matrix and biologic, contaminant, and/or molecule. In some embodiments, a change in pressure can be effected by increasing or decreasing the volume of the composition.

[0335] In some embodiments, the environmental factor is the addition of one or more surfactants. In some embodiments, the one or more surfactants are free fatty acid salts, soaps, fatty acid sulfonates, such as sodium lauryl sulfate, ethoxylated compounds, such as ethoxylated propylene glycol, lecithin, polygluconates, quaternary ammonium salts, lignin sulfonates, 3-((3-cholamidopropyl) dimethylammonio)-1-propanesulfonate (CHAPS), sugars, including sucrose and glucose, Triton X-100, and NP-40. In some embodiments, the surfactant is anionic, nonionic, or amphoteric.

[0336] In some embodiments, the environmental factor is the addition of one or more molecular crowding agents. Non-limiting examples of molecular crowding agents include polyethylene glycol, dextran, and ficoll. PEGS may include PEG400, PEG1450, PEG3000, PEG8000, and PEG10000.

[0337] In some embodiments, the environmental factor is the addition of one or more oxidizing agents. Non-limiting examples of oxidizing agents include hydrogen peroxide, hydrophilically or hydrophobically activated hydrogen peroxide, preformed peracids, monopersulfate or hypochlorite.

[0338] In some embodiments, the environmental factor is the addition of one or more reducing agents. In some embodiments, the one or more reducing agents is selected from the group consisting of dithiothreitol (DTT), 2-mercaptoethanol (BME), Tris (2-carboxyethyl) phosphine (TCEP), hydrazine, boron hydrides, amine boranes, lower alkyl substituted amine boranes, triethanolamine, and N,N,N′,N′-tetramethylethylenediamine (TEMED). In some embodiments, the environmental factor is the addition of one or more denaturing agents. Non-limiting examples of denaturing agents include urea, guanidine hydrochloride, guanidine, sodium salicylate, dimethyl sulfoxide, and propylene glycol.

[0339] In some embodiments, the environmental factor is the addition of one or more enzymes. Non-limiting examples of enzymes include proteases, kinases, phosphatases, synthetases, transferases, nucleases such as restriction endonucleases, lyases, isomerases, dehydrogenases, decarboxylases, and lipases.

[0340] In some embodiments, the environmental factor is the application of electromagnetic waves. In some embodiments, the environmental factor is the application of light. In some embodiments, the electromagnetic waves have a wavelength between about 0.0001 nm and about 100 m. In some embodiments, the electromagnetic waves are selected from the group consisting of gamma rays, x-rays, ultraviolet, visible, infrared, and radio waves. In some embodiments, the electromagnetic waves are gamma rays. In some embodiments, the gamma rays have a wavelength between about 0.0001 nm and about 0.01 nm, e.g. 0.0001 nm, 0.0005 nm, 0.001 nm, 0.002 nm, 0.003 nm, 0.004 nm, 0.005 nm, 0.006 nm, 0.007 nm, 0.008 nm, 0.009 nm, and 0.01 nm. In some embodiments, the x-rays have a wavelength between about 0.01 nm and about 10 nm, e.g. about 0.01 nm, 0.02 nm, 0.03 nm, 0.04 nm, 0.05 nm, 0.06 nm, 0.07 nm, 0.08 nm, 0.09 nm, 0.10 nm, 0.2 nm, 0.3 nm, 0.4 nm, 0.5 nm, 0.6 nm, 0.7 nm, 0.8 nm, 0.9 nm, 1 nm, 2 nm, 3 nm, 4 nm, 5 nm, 6 nm, 7 nm, 8 nm, 9 nm, or about 10 nm. In some embodiments, the ultraviolet radiation has a wavelength between about 10 nm about 400 nm, e.g. about 10 nm, about 20 nm, about 30 nm, about 40 nm, about 50 nm, about 60 nm, about 70 nm, about 80 nm, about 90 nm, about 100 nm, about 150 nm, about 200 nm, about 250 nm, about 280 nm, about 300 nm, about 350 nm, or about 400 nm. In some embodiments, the visible waves have a wavelength of between about 400 nm and about 800 nm, e.g. about 400 nm, about 450 nm, about 500 nm, about 550 nm, about 600 nm, about 650 nm, about 700 nm, about 750 nm, or about 800 nm. In some embodiments, the infrared radiation has a wavelength of between about 800 nm and about 0.1 cm, e.g. about 800 nm, about 1 μm, about 2 μm, about 3 μm, about 4 μm, about 5 μm, about 6 μm, about 7 μm, about 8 μm, about 9 μm, about 10 μm, about 20 μm, about 30 μm, about 40 μm, about 50 μm, about 60 μm, about 70 μm, about 80 μm, about 90 μm, about 100 μm, about 200 μm, about 300 μm, about 400 μm, about 500 μm, about 600 μm, about 700 μm, about 800 μm, about 900 μm, or about 0.1 cm. In some embodiments, the radio waves have a wavelength of between about 0.1 cm and 100 m, e.g. about 0.1 cm, about 1 cm, about 10 cm, about 100 cm, about 1000 cm, about 2000 cm, about 3000 cm, about 4000 cm, about 5000 cm, about 6000 cm, about 7000 cm, about 8000 cm, about 9000 cm, or about 100 m.

[0341] All patents, patent applications, references, and journal articles cited in this disclosure are expressly incorporated herein by reference in their entireties for all purposes.

### EXAMPLES

### Example 1. Expression of a Fusion Protein Comprising the Binding Domain of the AAV Receptor and a Second Polypeptide with Phase Behavior

[0342] A nucleic acid encoding the ectodomain of the AAV receptor (AAVR) was fused to a nucleic acid encoding a polypeptide with phase behavior ((GVGVPGLGVPGVGVPGLGVPGVGVP)₁₆ (SEQ ID NO:87)) and cloned into a pET24 plasmid. The plasmid was transformed into BL21 E. coli cells, and the cells were maintained under conditions that allowed for expression of the fusion protein.

[0343] The fusion protein was purified, aliquoted and formulated in PBS (as a control) or subjected to the following conditions known to impact protein function: (1) lyophilization and resuspension in PBS, (2) 30 min incubation in 0.1M NaOH followed by neutralization and buffer exchange into PBS, (3) 30 min incubation in 6M guanidine hydrochloride (GuHCl) followed by buffer exchange into PBS, (4) 30 min incubation in PBS at 95° C. followed by cooling on ice and returning to room temperature. The activity of each sample (i.e., the ability of AAVR to bind its target) was then measured by an assay for AAV8 capture. Briefly, activity was defined as the percentage of AAV8 captured, quantified using a Progen AAV8 total capsid ELISA.

[0344] Results are shown in FIG. 1. For all treatment conditions, the activity of the fusion protein remained within 80% of the untreated control.

### Example 2: Expression of a Fusion Protein Comprising the Z Domain of Staphylococcal Protein a and a Second Polypeptide with Phase Behavior

[0345] A nucleic acid encoding the Z domain derived from staphylococcal protein A (Seq ID: 180), which is known to bind to antibodies, was fused to a nucleic acid encoding a polypeptide with phase behavior ((GVGVPGLGVPGVGVPGLGVPGVGVP)₁₆ (SEQ ID NO:87)) and cloned into a pET24 plasmid. The plasmid was transformed into BL21 E. coli cells, and the cells were maintained under conditions that allowed for expression of the fusion protein. The fusion protein was then purified, and lyophilized.

[0346] The fusion protein was autoclaved on gravity cycle, and resuspended in PBS. The activity of the protein A was then tested. Specifically, activity was measured using an assay for antibody capture. Results are shown in FIG. 2. Fusion to the polypeptide with phase behavior helped the protein A to retain at least 85% activity after autoclaving/resuspension in PBS, compared to unautoclaved control.

[0347] The protein was also tested to determine whether fusion to the polypeptide with phase behavior could prevent loss of soluble, folded protein A after treatment with 0.1 M NaOH, heating to 95° C. in PBS, or heating in acidic buffer at pH 4. For the given treatment conditions, the samples were incubated for 10-30 minutes and then neutralized or cooled and centrifuged to remove any aggregated protein. To measure the percentage of protein lost by treatment, total protein was measured using a Protein A ELISA assay and compared to an untreated control. As shown in FIG. 3, exposure to these conditions resulted in less than 2% loss.

### Example 3. Expression of a Fusion Protein Comprising the Binding Domain of the AAV Receptor and a Second Polypeptide with Phase Behavior

[0348] A nucleic acid encoding PKD2 of the AAV receptor (Cys-His-PKD2) was fused to a nucleic acid encoding a polypeptide with phase behavior (ELP) and cloned into a pET24 plasmid. As a control, a nucleic acid encoding the PKD2 of the AAV receptor was cloned into a pET24 plasmid. The nucleic acid and protein sequences of PKD2 of the AAV receptor and the polypeptide with phase behavior are contained in Table 5 below.

TABLE 5
Nucleic Acid and Protein Sequences

| Target | | |
|---|---|---|
| Protein | Nucleic Acid Sequence | Protein Sequence |
| Cys-His- | ATGTGTCATCATCACCATCACCACAAT | (M)CHHHHHH-- |
| PKD2 | CGGCCACCAATTGCGATCGTGTCACCG | NRPPIAIVSPQFQEISLPTTSTVIDGSQST |
| | CAGTTCCAAGAAATCTCTTTACCGACA | DDDKIVQYHWEELKGPLREEKISEDTAILK |
| | ACTTCTACTGTCATTGATGGCAGCCAG | LSKLVPGNYTFSLTVVDSDGATNSTTANLT |
| | AGCACCGATGATGATAAAATCGTCCAG | VNKAVDYPGY |
| | TACCACTGGGAGGAATTGAAAGGGCCA | |
| | CTGCGCGAAGAAAAAATTAGCGAGGAC | |
| | ACTGCCATTCTTAAACTGAGTAAGCTC | |
| | GTACCGGGGAACTACACGTTCTCTTTG | |
| | ACAGTAGTCGATTCGGATGGGGCGACC | |
| | AACTCCACAACGGCGAATCTGACAGTT | |
| | AACAAGGCTGTGGATTATCCGggctac | |
| | tga | |
| ELP | GTGGGCGTTCCGGGGCTGGGTGTTCCG | VGVPGLGVPGVGVPGLGVPGVGVPGVGVPG |
| | GGCGTCGGTGTGCCAGGTCTGGGTGTA | LGVPGVGVPGLGVPGVGVPGVGVPGLGVPG |
| | CCGGGTGTTGGCGTCCCTGGTGTGGGC | VGVPGLGVPGVGVPGVGVPGLGVPGVGVPG |
| | GTTCCGGGGCTGGGTGTTCCGGGCGTC | LGVPGVGVPGVGVPGLGVPGVGVPGLGVPG |
| | GGTGTGCCAGGTCTGGGTGTACCGGGT | VGVPGVGVPGLGVPGVGVPGLGVPGVGVPG |
| | GTTGGCGTCCCTGGTGTGGGCGTTCCG | VGVPGLGVPGVGVPGLGVPGVGVPGVGVPG |
| | GGGCTGGGTGTTCCGGGCGTCGGTGTG | LGVPGVGVPGLGVPGVGVPGVGVPGLGVPG |
| | CCAGGTCTGGGTGTACCGGGTGTTGGC | VGVPGLGVPGVGVPGVGVPGLGVPGVGVPG |
| | GTCCCTGGTGTGGGCGTTCCGGGGCTG | LGVPGVGVPGVGVPGLGVPGVGVPGLGVPG |
| | GGTGTTCCGGGCGTCGGTGTGCCAGGT | VGVPGVGVPGLGVPGVGVPGLGVPGVGVPG |
| | CTGGGTGTACCGGGTGTTGGCGTCCCT | VGVPGLGVPGVGVPGLGVPGVGVPGVGVPG |
| | GGTGTGGGCGTTCCGGGGCTGGGTGTT | LGVPGVGVPGLGVPGVGVPGVGVPGLGVPG |
| | CCGGGCGTCGGTGTGCCAGGTCTGGGT | VGVPGLGVPGVGVPGVGVPGLGVPGVGVPG |
| | GTACCGGGTGTTGGCGTCCCTGGTGTG | LGVPGVGVPG |
| | GGCGTTCCGGGGCTGGGTGTTCCGGGC | |
| | GTCGGTGTGCCAGGTCTGGGTGTACCG | |
| | GGTGTTGGCGTCCCTGGTGTGGGCGTT | |
| | CCGGGGCTGGGTGTTCCGGGCGTCGGT | |
| | GTGCCAGGTCTGGGTGTACCGGGTGTT | |
| | GGCGTCCCTGGTGTGGGCGTTCCGGGG | |
| | CTGGGTGTTCCGGGCGTCGGTGTGCCA | |
| | GGTCTGGGTGTACCGGGTGTTGGCGTC | |
| | CCTGGTGTGGGCGTTCCGGGGCTGGGT | |
| | GTTCCGGGCGTCGGTGTGCCAGGTCTG | |
| | GGTGTACCGGGTGTTGGCGTCCCTGGT | |
| | GTGGGCGTTCCGGGGCTGGGTGTTCCG | |
| | GGCGTCGGTGTGCCAGGTCTGGGTGTA | |
| | CCGGGTGTTGGCGTCCCTGGTGTGGGC | |
| | GTTCCGGGGCTGGGTGTTCCGGGCGTC | |
| | GGTGTGCCAGGTCTGGGTGTACCGGGT | |
| | GTTGGCGTCCCTGGTGTGGGCGTTCCG | |
| | GGGCTGGGTGTTCCGGGCGTCGGTGTG | |
| | CCAGGTCTGGGTGTACCGGGTGTTGGC | |
| | GTCCCTGGTGTGGGCGTTCCGGGGCTG | |
| | GGTGTTCCGGGCGTCGGTGTGCCAGGT | |
| | CTGGGTGTACCGGGTGTTGGCGTCCCT | |
| | GGTGTGGGCGTTCCGGGGCTGGGTGTT | |
| | CCGGGCGTCGGTGTGCCAGGTCTGGGT | |
| | GTACCGGGTGTTGGCGTCCCTGGTGTG | |
| | GGCGTTCCGGGGCTGGGTGTTCCGGGC | |
| | GTCGGTGTGCCAGGTCTGGGTGTACCG | |
| | GGTGTTGGCGTCCCTGGTGTGGGCGTT | |
| | CCGGGGCTGGGTGTTCCGGGCGTCGGT | |
| | GTGCCAGGTCTGGGTGTACCGGGTGTT | |
| | GGCGTCCCTGGG | |
| Cys-His- | ATGTGTCATCATCACCATCACCACGTG | (M)CHHHHHH-- |
| 40L80- | GGCGTTCCGGGGCTGGGTGTTCCGGGC | VGVPGLGVPGVGVPGLGVPGVGVPGVGVPG |
| PKD2 | GTCGGTGTGCCAGGTCTGGGTGTACCG | LGVPGVGVPGLGVPGVGVPGVGVPGLGVPG |
| (Fusion | GGTGTTGGCGTCCCTGGTGTGGGCGTT | VGVPGLGVPGVGVPGVGVPGLGVPGVGVPG |
| Protein) | CCGGGGCTGGGTGTTCCGGGCGTCGGT | LGVPGVGVPGVGVPGLGVPGVGVPGLGVPG |
| | GTGCCAGGTCTGGGTGTACCGGGTGTT | VGVPGVGVPGLGVPGVGVPGLGVPGVGVPG |
| | GGCGTCCCTGGTGTGGGCGTTCCGGGG | VGVPGLGVPGVGVPGLGVPGVGVPGVGVPG |
| | CTGGGTGTTCCGGGCGTCGGTGTGCCA | LGVPGVGVPGLGVPGVGVPGVGVPGLGVPG |
| | GGTCTGGGTGTACCGGGTGTTGGCGTC | VGVPGLGVPGVGVPGVGVPGLGVPGVGVPG |
| | CCTGGTGTGGGCGTTCCGGGGCTGGGT | LGVPGVGVPGVGVPGLGVPGVGVPGLGVPG |
| | GTTCCGGGCGTCGGTGTGCCAGGTCTG | VGVPGVGVPGLGVPGVGVPGLGVPGVGVPG |
| | GGTGTACCGGGTGTTGGCGTCCCTGGT | VGVPGLGVPGVGVPGLGVPGVGVPGVGVPG |
| | GTGGGCGTTCCGGGGCTGGGTGTTCCG | LGVPGVGVPGLGVPGVGVPGVGVPGLGVPG |
| | GGCGTCGGTGTGCCAGGTCTGGGTGTA | VGVPGLGVPGVGVPGVGVPGLGVPGVGVPG |
| | CCGGGTGTTGGCGTCCCTGGTGTGGGC | LGVPGVGVPGNRPPIAIVSPQFQEISLPTT |
| | GTTCCGGGGCTGGGTGTTCCGGGCGTC | STVIDGSQSTDDDKIVQYHWEELKGPLREE |
| | GGTGTGCCAGGTCTGGGTGTACCGGGT | KISEDTAILKLSKLVPGNYTFSLTVVDSDG |
| | GTTGGCGTCCCTGGTGTGGGCGTTCCG | ATNSTTANLTVNKAVDYPGY |
| | GGGCTGGGTGTTCCGGGCGTCGGTGTG | |
| | CCAGGTCTGGGTGTACCGGGTGTTGGC | |
| | GTCCCTGGTGTGGGCGTTCCGGGGCTG | |
| | GGTGTTCCGGGCGTCGGTGTGCCAGGT | |
| | CTGGGTGTACCGGGTGTTGGCGTCCCT | |
| | GGTGTGGGCGTTCCGGGGCTGGGTGTT | |
| | CCGGGCGTCGGTGTGCCAGGTCTGGGT | |
| | GTACCGGGTGTTGGCGTCCCTGGTGTG | |
| | GGCGTTCCGGGGCTGGGTGTTCCGGGC | |
| | GTCGGTGTGCCAGGTCTGGGTGTACCG | |
| | GGTGTTGGCGTCCCTGGTGTGGGCGTT | |
| | CCGGGGCTGGGTGTTCCGGGCGTCGGT | |
| | GTGCCAGGTCTGGGTGTACCGGGTGTT | |
| | GGCGTCCCTGGTGTGGGCGTTCCGGGG | |
| | CTGGGTGTTCCGGGCGTCGGTGTGCCA | |
| | GGTCTGGGTGTACCGGGTGTTGGCGTC | |
| | CCTGGTGTGGGCGTTCCGGGGCTGGGT | |
| | GTTCCGGGCGTCGGTGTGCCAGGTCTG | |
| | GGTGTACCGGGTGTTGGCGTCCCTGGT | |
| | GTGGGCGTTCCGGGGCTGGGTGTTCCG | |
| | GGCGTCGGTGTGCCAGGTCTGGGTGTA | |
| | CCGGGTGTTGGCGTCCCTGGTGTGGGC | |
| | GTTCCGGGGCTGGGTGTTCCGGGCGTC | |
| | GGTGTGCCAGGTCTGGGTGTACCGGGT | |
| | GTTGGCGTCCCTGGTGTGGGCGTTCCG | |
| | GGGCTGGGTGTTCCGGGCGTCGGTGTG | |
| | CCAGGTCTGGGTGTACCGGGTGTTGGC | |
| | GTCCCTGGGAATCGGCCACCAATTGCG | |
| | ATCGTGTCACCGCAGTTCCAAGAAATC | |
| | TCTTTACCGACAACTTCTACTGTCATT | |
| | GATGGCAGCCAGAGCACCGATGATGAT | |
| | AAAATCGTCCAGTACCACTGGGAGGAA | |
| | TTGAAAGGGCCACTGCGCGAAGAAAAA | |
| | ATTAGCGAGGACACTGCCATTCTTAAA | |
| | CTGAGTAAGCTCGTACCGGGGAACTAC | |
| | ACGTTCTCTTTGACAGTAGTCGATTCG | |
| | GATGGGGCGACCAACTCCACAACGGCG | |
| | AATCTGACAGTTAACAAGGCTGTGGAT | |
| | TATCCGggctactga | |

[0349] A 5 mL overnight culture of BL21 E. coli cells was grown to express the His-tagged PKD2 protein, either alone or as a fusion with an ELP. 250 uL of this culture was used to inoculate a 50 mL culture, which was induced with 0.5 mM IPTG after 9 hours. After 24 hrs of incubation, the cells from each culture were centrifuged, resuspended in 10 mL of PBS buffer, and sonicated. The lysates were clarified by centrifugation. 1.5 mL of each clarified lysate was purified using a HisLink protein purification kit (Promega) and 200 uL elution fractions. The eluted material was quantified by measuring the 280 nm absorbance. Beer's Law was then used to calculate the grams and moles of protein and fusion protein purified per liter of E. coli cell culture. The purity and correct molecular weights were also assessed qualitatively using SDS-PAGE and Coomassie staining.

[0350] Expression of the fusion protein comprising PKD2 was compared to expression of PKD2 in the absence of polypeptide with phase behavior.

[0351] FIG. 4A shows the concentrations of PKD2 and fusion protein comprising PKD2 purified per liter. FIG. 4B shows the amount of PKD2 and fusion protein comprising PKD2 purified per liter. FIG. 4C shows expression of PKD2 and the fusion protein comprising PKD2 on a gel. These results show that ten times more soluble protein mass (fusion protein) and over three times more PKD2 (first polypeptide) can be extracted when the PKD2 domain is fused to a polypeptide with phase behavior compared to when PKD2 is expressed without a polypeptide with phase behavior.

### Example 4. Expression of a Fusion Protein Comprising the Binding Domain of the AAV Receptor and a Second Polypeptide with Phase Behavior

[0352] A nucleic acid encoding the CR3 domain of the LDL receptor (LDLR) was fused to a nucleic acid encoding a polypeptide with phase behavior and cloned into a pET24 plasmid. The plasmid was transformed into BL21 E. coli cells, and the cells were maintained under conditions that allowed for expression of the fusion protein. The fusion protein is referred to as IsoTag-LV in this example. The amino acid sequence of IsoTag-LV is found in Table 6 below.

TABLE 6
IsoTag-LV Protein Sequence

(M)SKGPGVGVPGVGVPGVGVPGVGVPGVGVPGVGVPGVGVPGVGVP
GVGVPGVGVPGVGVPGVGVPGVGVPGVGVPGVGVPGVGVPGVGVPGV
GVPGVGVPGVGVPGVGVPGVGVPGVGVPGVGVPGVGVPGVGVPGVGV
PGVGVPGVGVPGVGVPGVGVPGVGVPGVGVPGVGVPGVGVPGVGVPG
VGVPGVGVPGVGVPGVGVPGVGVPGVGVPGVGVPGVGVPGVGVPGVG
VPGVGVPGVGVPGVGVPGVGVPGVGVPGVGVPGVGVPGVGVPGVGVP
GVGVPGVGVPGVGVPGVGVPGVGVPGVGVPGVGVPGVGVPGVGVPGV
GVPGVGVPGVGVPGVGVPGVGVPGVGVPGVGVPGVGVPGVGVPGVGV
PGVGVPGVGVPGVGVPGVGVPGVGVPGVGVPGTCSQDEFRCHDGKCI
SRQFVCDSDRDCLDGSDEASCPG

[0353] The stability of IsoTag-LV was evaluated by measuring lentivirus (LV) capture activity of the fusion protein control versus the fusion protein with exposure to extreme conditions known to degrade, aggregate, or inactivate polypeptides.

[0354] 20 μM IsoTag-LV was incubated for 30 minutes in 6M guanidine-HCL (6M GuHCl) or 0.1M NaOH (0.1M NaOH) followed by six, 500 μL PBS washes in 30 kDa Amicon spin filters. 20 μM IsoTag-LV was incubated for 30 minutes at 95° C., followed by a 30-minute incubation on ice.

[0355] 10 μM IsoTag from the described incubations, as well as untreated IsoTag (Control IsoTag-LV) were added to 500 μL lentivirus, incubated for 5 minutes on ice and then 5 minutes at 37° C. before being spun for 5 minutes at 10,000 rpm to capture and pellet the lentivirus target. Harvested supernatants (representing any uncaptured LV target) were analyzed using a p24 assay (VPK-107, Cell Biolabs), to measure LV envelope p24 protein as a surrogate measure of lentivirus titer. As a control for no capture activity, lentivirus without any IsoTag addition was also measured (Control (No IsoTag-LV) in duplicate. Absorbance values were plotted using GraphPad Prism V9. Error bars represent the standard error of the mean. There is no statistically significant difference in the LV capture activity of the control fusion protein compared to the fusions treated with heating to 95° C., 0.1M NaOH incubation, or 6M GuHCl incubation. This shows that expression the CR3 domain of LDLR as a fusion protein with a polypeptide with phase behavior protects the CR3 domain of LDLR from degradation. Results are shown in FIG. 5.

### Example 5: Estimated Yield in E. coli of Additional Fusion Proteins Comprising a First Polypeptide and a Second Polypeptide with Phase Behavior

[0356] Nucleic acids encoding various proteins with biological functionality (referred to herein as target proteins) were fused to nucleic acid sequences encoding a polypeptide with phase behavior ((GVGVPGLGVPGVGVPGLGVPGVGVP)₁₆ (SEQ ID NO:87), and expressed as recombinant fusion proteins in E. coli BL21 cells. More specifically, the nucleic acids encoding a fusion protein were cloned into a pET24 plasmid, which is transfected into the E. coli cells. Expression of the fusion proteins was induced by adding Isopropyl β-d-1-thiogalactopyranoside (IPTG) to a shake flask containing the cells. The fusion proteins were purified using phase separation, indicating that the yield was at least 10 mg/L. Table 7 shows a list of target proteins for use in the fusions. It is estimated that the yield of each purified protein may be at least 15 mg per liter, with some yields as high as 300 mg per liter.

TABLE 7
Target protein expression levels

| | Expressed in Soluble Fraction? |
|---|---|
| Target Protein | (Yes(Y)/No(N)) |
| SpA Z-domain | Y |
| B domain of Protein A | Y |
| C domain of Protein A | Y |
| Binding domain of AAVR | Y |
| Full length AAVR | Y |
| CD4 | Y |
| CAR | Y |
| LDL-R domain | Y |
| ABD | Y |
| FN3 | Y |
| PABP | Y |
| ZBP | Y |

### Example 6: Use of Fusion Proteins for Modification of Nucleic Acids

[0357] This example evaluates the ability of the fusion proteins described herein to facilitate modification of DNA and RNA. A fusion protein comprising a nucleic acid binding protein (NBP) and a polypeptide with phase behavior is incubated with a nucleic acid substrate (e.g., DNA or RNA) for sufficient time for the NBP in either the soluble or phase separated form to generate a product or to generate an affinity bound complex. Subsequently, an environmental factor (e.g., 0.6 M NaCl) is added to the solution to phase separate the fusion protein. This phase separation serves to increase the enzymatic reaction, concentration, and/or purity of the nucleic acid target. The fusion protein is separated from the product via tangential flow filtration, depth filtration, or centrifugation. The product is incubated with additional fusion proteins and subjected to the same procedures as described for the first fusion protein to make additional modifications to the nucleic acid. In each of the aforementioned steps, additional reagents may be added to facilitate performance of the fusion protein (e.g., cofactors, ribonucleotide triphosphates, deoxynucleoside triphosphates, salts, etc.)

[0358] At any point, the samples can be centrifuged or filtered to separate the fusion protein and anything affinity bound to it from the components in the soluble phase. At any point, a second environmental factor (e.g. low pH, cofactor, salt) can be added to disrupt binding of the product or substrate with the NBP fusion protein in its soluble or phase separated state.

[0359] An exemplary process for transcribing DNA to mRNA is described below. A nucleic acid encoding the NBP T7 RNA polymerase and a polypeptide with phase behavior (e.g., GVGVPGLGVPGVGVPGLGVPGVGVP)₁₆ (SEQ ID NO: 87)) is expressed as a recombinant fusion protein in E. coli BL21 cells and purified. The purified fusion protein is incubated with a composition comprising a DNA substrate and rNTPs at conditions in which the fusion protein is soluble for about an hour at 37° C. to form RNA. Salt (0.6 M NaCl) is added to separate the fusion protein, which is bound to the RNA product, from the composition. The RNA product is separated from the fusion protein by continuous centrifugation.

[0360] Subsequent reactions are performed to add a poly(A) tail to the 3′ end of the RNA product and a methyl group to the 5′ end of the RNA product. The poly(A) tail is added via a fusion protein comprising PABP and a polypeptide with phase behavior. The methyl group is added to the 5′ end of the RNA product via a fusion protein comprising mRNA Cap 2-O-Methyltransferase and a polypeptide with phase behavior. The final product is a mRNA containing a 5′ methyl group and a 3′ poly(A) tail.

[0361] Additional modifications to DNA and RNA may be performed in a similar manner using any of the NBP described herein. For example, the NBP may be any of the following proteins: T7 RNA polymerase, Rnase inhibitor, 2′-O-Methyltransferase, Inorganic Pyrophosphatase, Poly(A) Polymerase. DNase I, Calf intestinal phosphatase, Antarctic phosphatase, D1 subunit of the Vaccinia virus mRNA capping enzyme, Guanine-7-methyltransferase (found in D1 subunit of the Vaccinia virus mRNA capping enzyme), Guanylyltransferase (found in D1 subunit of the Vaccinia virus mRNA capping enzyme), RNA triphosphatase (found in D1 subunit of the Vaccinia virus mRNA capping enzyme), and D12 subunit of vaccinia virus mRNA capping enzyme, a stem-loop binding protein, a heterogenous ribonucleoprotein (hnRNP), GroEL, Edc3, DHX9, Xrn1, Dep1, Dep2, LAF-1, MEG-1, MEG-3, ASF/SF2 splicing factor, serine/arginine rich splicing factor 4 (SRp75), the serine and arginine rich splicing factor 1 (SRSF1), the L3 ribosomal protein, the L4 ribosomal protein, the L13 ribosomal protein, the L20 ribosomal protein, the L22 ribosomal protein, the L24 ribosomal protein, the L24e ribosomal protein, the S12 ribosomal protein, the S14 ribosomal protein, and the eukaryotic initiation factor 4E-binding protein 1 (4EBP1), Tat, Rev, RSG-1.2 peptide, poly(A)-binding protein (PABP), eukaryotic translation initiation factor 4E (eIF4E), eukaryotic translation initiation factor3 Subunit D (eIF3D), heterogenous nuclear ribonucleoproteins (hnRNPs), RNA-specific adenosine deaminase 1 (ADAR1), RNA-specific adenosine deaminase 2 (ADAR2), CspB from Bacillus subtilis (Bscscp), Y-box protein 1 cold shock domain (YB1-CSD), a Fox-1 protein (FOX1), poly(A)-binding protein (PABP), Staufen protein, TIS11d, zinc finger protein (ZNF), Z-DNA binding protein 1 (ZBP1), retinoic acid-inducible gene-I (RIG-I) like protein, toll like receptor 7 (TLR7), toll like receptor 8 (TLR3), toll like receptor 8 (TLR8), retinoic acid-inducible gene I (RIG-I), melanoma differentiation-associated protein 5 (MDA5), interferon induced protein with tetratricopeptide repeats 1 (IFIT1), protein kinase R (PKR), an oligoadenylate synthase-like (OASL) protein (e.g., OAS1, OAS2, OAS3, or OASL), ribonuclease E (RNASE E), gamma-interferon-inducible protein Ifi-16 (IF116), cyclic GMP-AMP synthase (cGAS), or a catalytic fragment thereof.

### NUMBERED EMBODIMENTS OF THE DISCLOSURE

[0362] Notwithstanding the appended claims, the disclosure sets forth the following numbered embodiments:

[0363] 1. A fusion protein comprising a first polypeptide and a second polypeptide, wherein the second polypeptide has phase behavior.

[0364] 2. The fusion protein of embodiment 1, wherein the first polypeptide is:
[0365] i) an enzyme, or a derivative or catalytic fragment thereof;
[0366] ii) an antibody, or a derivative or antigen-binding fragment thereof;
[0367] iii) a signaling molecule, or a fragment or derivative thereof;
[0368] iv) a structural protein, or a fragment or derivative thereof; or
[0369] v) a hormone, or a fragment or derivative thereof.

[0370] 3. The fusion protein of embodiment 1, wherein the first polypeptide is a mammalian polypeptide.

[0371] 4. The fusion protein of embodiment 1, wherein the first polypeptide is a viral polypeptide.

[0372] 5. The fusion protein of embodiment 1, wherein the first polypeptide is a bacterial polypeptide.

[0373] 6. The fusion protein of embodiment 1, wherein the first polypeptide is a toxin.

[0374] 7. The fusion protein of embodiment 1, wherein the first polypeptide is an antigenic polypeptide.

[0375] 8. The fusion protein of embodiment 1, wherein the first polypeptide is an enzyme capable of performing one or more steps involved in protein synthesis or modification.

[0376] 9. The fusion protein of embodiment 1, wherein the first polypeptide is an enzyme capable of performing one or more steps involved in DNA synthesis or modification.

[0377] 10. The fusion protein of embodiment 1, wherein the first polypeptide is an enzyme capable of performing one or more steps involved in RNA synthesis or modification.

[0378] 11. The fusion protein of embodiment 1, wherein the first polypeptide is selected from the cluster of differentiation 4 (CD4), the Z-domain of Staphylococcus protein A (SpA Z-domain), low-density lipoprotein receptor (LDLR), albumin binding polypeptide (ABD), coxsackievirus and adenovirus receptor (CAR), fibronectin type III (FN3), poly(A) binding protein (PABP), Z-DNA binding protein 1 (ZBP1), or a fragment or derivative thereof.

[0379] 12. The fusion protein of embodiment 1, wherein the first polypeptide is a polypeptide isolated or derived from SARS-COV-2.

[0380] 13. The fusion protein of embodiment 12, wherein the first polypeptide is the SARS-COV-2 spike protein, or a fragment or derivative thereof.

[0381] 14. The fusion protein of embodiments 1-13, wherein the first polypeptide with phase behavior is an elastin-like polypeptide (ELP) or a resilin-like polypeptide (RLP).

[0382] 15. The fusion protein of any one of embodiments 1-13, wherein the polypeptide with phase behavior comprises a pentapeptide repeat having the sequence (Val-Pro-Gly-Xaa-Gly)ₙ (SEQ ID NO: 10), or a randomized, scrambled analog thereof; wherein Xaa can be any amino acid except proline, wherein n is an integer between 1 and 360, inclusive of endpoints.

[0383] 16. The fusion protein of any one of embodiments 1-13, wherein the polypeptide with phase behavior comprises an amino acid sequence selected from:

a.
(SEQ ID NO: 1)
(GRGDSPY)ₙ
b.
(SEQ ID NO: 2)
(GRGDSPH)ₙ
c.
(SEQ ID NO: 3)
(GRGDSPV)ₙ
d.
(SEQ ID NO: 4)
(GRGDSPYG)ₙ
e.
(SEQ ID NO: 5)
(RPLGYDS)ₙ
f.
(SEQ ID NO: 6)
(RPAGYDS)ₙ
g.
(SEQ ID NO: 7)
(GRGDSYP)ₙ
h.
(SEQ ID NO: 8)
(GRGDSPYQ)ₙ
i.
(SEQ ID NO: 9)
(GRGNSPYG)ₙ
j.
(SEQ ID NO: 11)
(GVGVP)ₙ;
k.
(SEQ ID NO: 12)
(GVGVPGLGVPGVGVPGLGVPGVGVP)ₘ;
l.
(SEQ ID NO: 13)
(GVGVPGVGVPGAGVPGVGVPGVGVP)ₘ;
m.
(SEQ ID NO: 14)
(GVGVPGWGVPGVGVPGWGVPGVGVP)ₘ;
n.
(SEQ ID NO: 15)
(GVGVPGVGVPGVGVPGVGVPGVGVPGVGVPGEGVPGFGV
PGVGVP)ₘ;
o.
(SEQ ID NO: 16)
(GVGVPGVGVPGVGVPGVGVPGVGVPGVGVPGKGVPGFGV
PGVGVP)ₘ;
and
p.
(SEQ ID NO: 17)
(GAGVPGVGVPGAGVPGVGVPGAGVP)ₘ;

[0384] or a randomized, scrambled analog thereof;
[0385] wherein:
[0386] n is an integer in the range of 20-360, inclusive of endpoints; and
[0387] m is an integer in the range of 4-25, inclusive of endpoints.

[0388] 17. The fusion protein of any one of embodiments 1-13, wherein the polypeptide with phase behavior comprises an amino acid sequence selected from:

(SEQ ID NO: 143)
(GVGVP)ₘ;
(SEQ ID NO: 148)
(ZZPXXXXGZ)ₘ;
(SEQ ID NO: 149)
(ZZPXGZ)ₘ;
(SEQ ID NO: 150)
(ZZPXXGZ)ₘ;
or
(SEQ ID NO: 151)
(ZZPXXXGZ)ₘ,

[0389] wherein m is an integer between 10 and 160, inclusive of endpoints,
[0390] wherein X if present is any amino acid except proline or glycine, and
[0391] wherein Z if present is any amino acid.

[0392] 18. The fusion protein of any one of embodiments 1-13, wherein the polypeptide with phase behavior comprises an amino acid sequence selected from:

(a)
(SEQ ID NO: 144)
(GVGVPGVGVPGAGVPGVGVPGVGVP)ₘ;
or
(b)
(SEQ ID NO: 146)
(GVGVPGVGVPGLGVPGVGVPGVGVP)ₘ;

[0393] wherein m is an integer between 2 and 32, inclusive of endpoints.

[0394] 19. The fusion protein of any one of embodiments 1-13, wherein the polypeptide with phase behavior comprises an amino acid sequence selected from:
[0395] (a) (GVGVPGVGVPGAGVPGVGVPGVGVP)ₘ (SEQ ID NO: 144), wherein m is 8 or 16;
[0396] (b) (GVGVPGAGVP)ₘ (SEQ ID NO: 145), wherein m is an integer between 5 and 80, inclusive of endpoints; or
[0397] (c) (GXGVP)ₘ (SEQ ID NO: 147),
[0398] wherein m is an integer between 10 and 160, inclusive of endpoints, and
[0399] wherein X for each repeat is independently selected from the group consisting of glycine, alanine, valine, isoleucine, leucine, phenylalanine, tyrosine, tryptophan, lysine, arginine, aspartic acid, glutamic acid, and serine.

[0400] 20. The fusion protein of embodiment 1, wherein the polypeptide with phase behavior comprises an amino acid of SEQ ID NO: 88 or a sequence of (GVGVPGLGVPGVGVPGLGVPGVGVP)ₘ, wherein m is 16 (SEQ ID NO: 12).

[0401] 21. The fusion protein of any one of embodiments 1 to 20, wherein the fusion protein comprises a linker that links the first polypeptide and the second polypeptide.

[0402] 22. The fusion protein of embodiment 21, wherein the linker is cleavable.

[0403] 23. The fusion protein of embodiment 21, wherein the linker comprises a protease cleavage site.

[0404] 24. The fusion protein of embodiment 21, wherein the linker is a self-cleaving peptide.

[0405] 25. The fusion protein of embodiment 21, wherein the linker is selected from the group consisting of:

i)
(SEQ ID NO: 141)
(GₓS)ₙ,
ii)
(SEQ ID NO: 142)
(SₓG)ₙ,
iv)
(SEQ ID NO: 19)
(GGGGS)ₙ,
and
v)
(SEQ ID NO: 48)
(G)ₙ;

[0406] wherein x is an integer in the range of 1 to 6, and
[0407] n is an integer in the range of 1 to 30.

[0408] 26. The fusion protein of embodiment 21, wherein the linker is selected from GKSSGSGSESKS (SEQ ID NO: 157), GSTSGSGKSSEGKG (SEQ ID NO: 158), GSTSGSGKSSEGSGSTKG (SEQ ID NO: 159), GSTSGSGKPGSGEGSTKG (SEQ ID NO: 160), EGKSSGSGSESKEF (SEQ ID NO: 161), SRSSG (SEQ ID NO: 162), and SGSSC (SEQ ID NO: 163).

[0409] 27 The fusion protein of any one of embodiments 1-26, wherein the protein comprises from N-terminus to C-terminus, the first polypeptide and the second polypeptide.

[0410] 28. The fusion protein of any one of embodiments 1-26, wherein the protein comprises from N-terminus to C-terminus, the second polypeptide and the first polypeptide.

[0411] 29. The fusion protein of any one of embodiments 21-26, wherein the protein comprises from N-terminus to C-terminus, the first polypeptide, the linker, and the second polypeptide.

[0412] 30. The fusion protein of any one of embodiments 21-26, wherein the protein comprises from N-terminus to C-terminus, the second polypeptide, the linker, and the first polypeptide.

[0413] 31. A method for stabilizing a first polypeptide, the method comprising expressing a fusion protein comprising the first polypeptide and a second polypeptide, wherein the second polypeptide is a polypeptide having phase behavior.

[0414] 32. The method of embodiment 31, wherein the fusion protein is the fusion protein of any one of embodiments 1-30.

[0415] 33. A method for substantially preventing the unfolding, degradation, and/or misfolding of a first polypeptide, the method comprising expressing a fusion protein comprising the first polypeptide and a second polypeptide, wherein the second polypeptide is a polypeptide having phase behavior.

[0416] 34. The method of embodiment 33, wherein the fusion protein is the fusion protein of any one of embodiments 1-30.

[0417] 35. A method for substantially preventing loss of activity of a first polypeptide after exposure to one or more conditions known to unfold, degrade, and/or misfold the first polypeptide, the method comprising expressing a fusion protein comprising the first polypeptide and a second polypeptide, wherein the second polypeptide is a polypeptide having phase behavior.

[0418] 36. The method of embodiment 35, wherein the fusion protein is the fusion protein of any one of embodiments 1-30.

[0419] 37. The method of embodiment 35 or 36, wherein less than 25%, less than 20%, less than 15%, less than 10%, less than 5%, less than 3%, less than 2%, or less than 1% of the activity of the first polypeptide is lost after exposure to one or more of the conditions.

[0420] 38. A method for producing a first polypeptide, the method comprising:
[0421] i) expressing a fusion protein comprising the first polypeptide and a second polypeptide having phase behavior; and
[0422] ii) separating the first polypeptide from the second polypeptide.

[0423] 39. The method of embodiment 38 wherein the fusion protein is expressed in a host cell selected from a mammalian cell, a bacterial cell, a fungal cell, a yeast cell, and a plant cell.

[0424] 40. The method of embodiment 39, wherein the yield of the first polypeptide is greater than 15 mg per liter, greater than 30 mg per liter, greater than 50 mg per liter, greater than 100 mg per liter, greater than 200 mg per liter, or greater than 200 mg per liter of host cell suspension.

[0425] 41. A method for purifying a first polypeptide, the method comprising:
[0426] i) providing a fusion protein comprising the first polypeptide and a second polypeptide having phase behavior;
[0427] ii) applying a first environmental factor to the fusion protein;
[0428] iii) separating the fusion protein aggregates from at least one contaminant on the basis of size and/or density;
[0429] iv) applying a second environmental factor to disaggregate the fusion protein.

[0430] 42. The method of embodiment 41, wherein the fusion protein is the fusion protein of any one of embodiments 1-30.

[0431] 43. The method of embodiment 41 or 42, wherein the first environmental factor and the second environmental each comprise:
[0432] a. a change in one or more of temperature, pH, salt concentration or pressure;
[0433] b. the addition of one or more surfactants, cofactors, vitamins, molecular crowding agents, enzymes, denaturing agents; or
[0434] c. the application of electromagnetic or acoustic waves.

[0435] 44. The method of any one of embodiments 41-43, wherein separating the fusion protein aggregates from at least one contaminant comprises separation on the basis of size.

[0436] 45. The method of embodiment 44, wherein separation on the basis of size is achieved using a technique selected from the group consisting of tangential flow filtration, analytical ultracentrifugation, membrane chromatography, high performance liquid chromatography, normal flow filtration, depth filtration, acoustic wave separation, centrifugation, counterflow centrifugation, and fast protein liquid chromatography

[0437] 46. The method of any one of embodiments 41-45, wherein the method comprises:
[0438] v) separating the first polypeptide from the second polypeptide.

[0439] 47. The method of any one of embodiments 41-46, wherein the first environmental factor and the second environmental factor are the same.

[0440] 48. The method of any one of embodiments 41-46, wherein the first environmental factor and the second environmental factor are applied at the same time.

[0441] 49. A method for performing a multi-step enzymatic process on a substrate, the method comprising:
[0442] i) providing a first fusion protein comprising a first enzyme and a polypeptide having a first phase behavior;
[0443] ii) providing a second fusion protein comprising a second enzyme and polypeptide having a second phase behavior;
[0444] iii) applying a first environmental factor, which allows the first enzyme to contact the substrate; and
[0445] iv) applying a second environmental factor, which allows the second enzyme to contact the substrate.

[0446] 50. The method of embodiment 49, wherein at least one of the first fusion protein and the second fusion protein is a fusion protein of any one of embodiments 1-30.

[0447] 51. The method of embodiment 49 or 50, wherein the method further comprises at least one of:
[0448] v) applying a third environmental factor, which separates the first enzyme from the substrate;
[0449] vi) applying a fourth environmental factor, which separates the second enzyme from the substrate.

[0450] 52. The method of any one of embodiments 49-51, wherein the first environmental factor and the second environmental each comprise:
[0451] a. a change in one or more of temperature, pH, salt concentration or pressure;
[0452] b. the addition of one or more surfactants, cofactors, vitamins, molecular crowding agents, enzymes, denaturing agents; or
[0453] c. the application of electromagnetic waves.

[0454] 52. A method for performing a multi-step enzymatic process on a substrate, the method comprising:
[0455] i) providing a first fusion protein comprising a first enzyme and a polypeptide having a first phase behavior;
[0456] ii) providing a second fusion protein comprising a second enzyme and polypeptide having a second phase behavior;
[0457] iii) applying a first environmental factor, which allows the first enzyme to contact, isolate, and/or concentrate the substrate; and
[0458] iv) applying a second environmental factor, which allows the second enzyme to contact, isolate, and/or concentrate the substrate.

[0459] 53. The method of embodiment 52, wherein at least one of the first fusion protein and the second fusion protein is a fusion protein of any one of embodiments 1-30.

[0460] 54. The method of embodiment 52 or 53, wherein the method further comprises at least one of:
[0461] v) applying a third environmental factor, which separates the first enzyme from the substrate;
[0462] vi) applying a fourth environmental factor, which separates the second enzyme from the substrate.

[0463] 55. The method of any one of embodiments 52-54, wherein the first environmental factor and the second environmental each comprise:
[0464] a. a change in one or more of temperature, pH, salt concentration or pressure;
[0465] b. the addition of one or more surfactants, cofactors, vitamins, molecular crowding agents, enzymes, denaturing agents; or
[0466] c. the application of electromagnetic waves.

[0467] 56. A method for contacting, isolating, and/or purifying a substrate, the method comprising:
[0468] i) providing a first fusion protein comprising a first enzyme and a polypeptide having a first phase behavior;
[0469] ii) providing a second fusion protein comprising a second enzyme and polypeptide having a second phase behavior;
[0470] iii) applying a first environmental factor, which allows the first enzyme to contact, isolate, and/or concentrate the substrate; and
[0471] iv) applying a second environmental factor, which allows the second enzyme to contact, isolate, and/or concentrate the substrate.

[0472] 57. The method of embodiment 56, wherein at least one of the first fusion protein and the second fusion protein is a fusion protein of any one of embodiments 1-30.

[0473] 58. The method of embodiment 56 or 57, wherein the method further comprises at least one of:
[0474] v) applying a third environmental factor, which separates the first enzyme from the substrate;
[0475] vi) applying a fourth environmental factor, which separates the second enzyme from the substrate.

[0476] 59. The method of any one of embodiments 56-59, wherein the first environmental factor and the second environmental each comprise:
[0477] a. a change in one or more of temperature, pH, salt concentration or pressure;
[0478] b. the addition of one or more surfactants, cofactors, vitamins, molecular crowding agents, enzymes, denaturing agents; or
[0479] c. the application of electromagnetic waves.

### INCORPORATION BY REFERENCE

[0480] All references, articles, publications, patents, patent publications, and patent applications cited herein are incorporated by reference in their entireties for all purposes. However, mention of any reference, article, publication, patent, patent publication, and patent application cited herein is not, and should not be taken as, an acknowledgment or any form of suggestion that it constitutes valid prior art or form part of the common general knowledge in any country in the world.

What is claimed is:

1. A method for stabilizing a first polypeptide, the method comprising expressing a fusion protein comprising the first polypeptide and a second polypeptide, wherein the second polypeptide is a polypeptide having phase behavior, wherein when the fusion protein is exposed to one or more conditions that would destabilize the first polypeptide, the first polypeptide substantially retains its activity.

2. A method for substantially preventing loss of activity of a first polypeptide after exposure to one or more conditions that unfold, degrade, and/or misfold the first polypeptide, the method comprising expressing a fusion protein comprising the first polypeptide and a second polypeptide, wherein the second polypeptide is a polypeptide having phase behavior.

3. A method for substantially preventing the unfolding, degradation, and/or misfolding of a first polypeptide, the method comprising expressing a fusion protein comprising the first polypeptide and a second polypeptide, wherein the second polypeptide is a polypeptide having phase behavior, wherein when the fusion protein is exposed to one or more conditions that would cause unfolding, degradation, and/or misfolding.

4. A method for improving a yield of a first polypeptide, the method comprising:
i) expressing a fusion protein comprising the first polypeptide and a second polypeptide having phase behavior; and
ii) separating the first polypeptide from the second polypeptide,
wherein the yield of the first polypeptide is improved when expressed as the fusion protein compared to a yield of the first polypeptide when not expressed as a fusion protein.

5. The method of any one of claims 1-3, comprising removing the fusion protein from the conditions and cleaving the first polypeptide from the second polypeptide, wherein the first polypeptide retains its activity compared to a control first polypeptide that has not been exposed to the conditions.

6. The method of any one of claim 1, 2, or 5, wherein the one or more conditions that unfold, degrade, misfold, or destabilize the first polypeptide comprise: exposure to an oxidizing agent, lyophilization, exposure to non-physiologic pH, exposure to a chaotropic agent, exposure to temperature of at least 50° C., exposure to an organic solvent, exposure to urea, exposure to a detergent, exposure to an autoclave, freeze-thaw cycling, heat shock, or a combination thereof.

7. The method of any one of claim 1, 2, 5, or 6, wherein the one or more conditions that unfold, degrade, misfold, or destabilize the first polypeptide comprise: exposure to non-physiologic pH.

8. The method of claim 7, wherein exposure to non-physiologic pH is exposure to acid.

9. The method of claim 8, wherein the acid is guanidine hydrochloride.

10. The method of claim 7, wherein exposure to non-physiologic pH is exposure to base.

11. The method of claim 10, wherein the base is sodium hydroxide or urea.

12. The method of claim 6, wherein the one or more conditions known to unfold, degrade, misfold, or destabilize the first polypeptide are exposure to guanidine hydrochloride, exposure to urea, lyophilization, freeze-thaw cycling, autoclaving, exposure to sodium hydroxide, or exposure to temperature of at least 90° C.

13. The method of any one of claim 1, 2, 5, or 6, wherein the one or more conditions known to unfold, degrade, misfold, or destabilize the first polypeptide is exposure to 0.1 M NaOH.

14. The method of any one of claim 1, 2, 5, 6, or 13, wherein the one or more conditions known to unfold, degrade, misfold, or destabilize the first polypeptide is exposure to 0.1 M NaOH for 30 minutes.

15. The method of any one of claim 1, 2, 5, or 6, wherein the one or more conditions known to unfold, degrade, or destabilize the first polypeptide is exposure to 6 M guanidine hydrochloride.

16. The method of any one of claim 1, 2, 5, or 6, or 15, wherein the one or more conditions known to unfold, degrade, misfold or destabilize the first polypeptide is exposure to 6 M guanidine hydrochloride for 30 minutes.

17. The method of any one of claim 1, 2, 5, or 6, wherein the one or more conditions known to unfold, degrade, misfold or destabilize the first polypeptide is heating to at least 95° C.

18. The method of any one of claim 1, 2, 5, or 6, wherein the condition is heat shock, and wherein heat shock comprises:
heating the fusion protein comprising the first polypeptide to 95° C. for 30 minutes;
placing a container containing the fusion protein on ice, and then
returning the fusion protein to room temperature.

19. The method of any one of claim 1, 2, or 5-18, wherein the fusion protein comprising the first polypeptide is exposed to the one or more conditions for about 15 minutes, about 30 minutes, about 45 minutes, about 1 hour, about 2 hours, about 3 hours, about 4 hours, about 5 hours, about 6 hours, about 7 hours, about 8 hours, about 9 hours, about 10 hours, about 11 hours, about 12 hours, about 13 hours, about 14 hours, about 15 hours, about 16 hours, about 17 hours, about 18 hours, about 19 hours, about 20 hours, about 21 hours, about 22 hours, about 23 hours, or about 24 hours.

20. The method of any one of claim 1, 2, or 5-18, wherein exposure to the one or more conditions occurs for at least about 30 minutes.

21. The method of any one of claim 1, 2, 6-10, 13, 15, or 17, wherein exposure to the one or more conditions occurs for about 30 minutes to about 12 hours, about 30 minutes to about 11 hours, about 30 minutes to about 10 hours, about 30 minutes to about 9 hours, about 30 minutes to about 8 hours, about 30 minutes to about 7 hours, about 30 minutes to about 6 hours, about 30 minutes to about 5 hours, about 30 minutes to about 4 hours, about 30 minutes to about 3 hours, about 30 minutes to about 2 hours, or about 30 minutes to about 1 hours.

22. The method of any one of claim 1, 2, or 5-21, wherein the activity of the first polypeptide is its affinity for a binding partner of the first polypeptide.

23. The method of any one of claim 1, 2, or 5-21, wherein the first polypeptide is an enzyme, and wherein the activity is k_{cat}.

24. The method of any one of claim 1, 2, or 5-23, wherein less than 35%, less than 30%, less than 25%, less than 20%, less than 15%, less than 10%, less than 5%, less than 3%, less than 2%, or less than 1% of the activity of the first polypeptide is lost after exposure to one or more of the conditions as compared to a control, wherein the control is not exposed to a condition known to unfold, degrade, or destabilize the first polypeptide.

25. The method of any one of claim 1, 2, or 5-24 wherein the first polypeptide retains from 65% to 100% of its activity after exposure to one or more of the conditions as compared to a control.

26. The method claim 25, wherein the first polypeptide retains at least 65%, at least 70%, at least 75%, at least 80%, at least 85%, at least 90%, at least 95%, or 100% of the its activity after exposure to one or more of the conditions as compared to a control.

27. The method of claim 24, wherein less than 20% or less than 25% of the activity of the first polypeptide is lost after exposure to one or more of the conditions as compared to a control, wherein the control is not exposed to a condition known to unfold, degrade, or destabilize the first polypeptide.

28. The method of claim 25, wherein of the first polypeptide retains at least 80% of its activity after exposure to one or more of the conditions as compared to a control compared control.

29. The method of any one of claim 1, 2, or 5-28, wherein the first polypeptide retains its activity at 4° C. for about 1 week, about 2 weeks, about 3 weeks, about 4 weeks, about 5 weeks, about 6 weeks, about 7 weeks, about 8 weeks, about 9 weeks, about 10 weeks, about 11 weeks, about 12 weeks, about 1 month, about 2 months, about 3 months, about 4 months, about 5 months, about 6 months, about 7 months, about 8 months, about 9 months, about 10 months, about 11 months or about 12 months.

30. The method of any one of claim 1, 2, or 5-28, wherein the first polypeptide retains its activity at −20° C. for about 6 months, about 9 months, about 1 year, about 2 years, about 3 years, about 4 years, about 5 years, about 6 years, about 7 years, about 8 years, about 9 years, or about 10 years.

31. The method of claim 4, wherein the yield of the first polypeptide is greater than 15 mg per liter, greater than 30 mg per liter, greater than 50 mg per liter, greater than 75 mg per liter, greater than 100 mg per liter, greater than 200 mg per liter, or greater than 300 mg per liter of host cell suspension.

32. The method of claim 4, wherein the yield of the first polypeptide in the fusion protein is at least about 50%, at least about 75%, at least about 100%, at least about 125%, at least about 150%, at least about 175%, at least about 200%, at least about 225%, at least about 250%, at least about 275%, at least about 300%, at least about 325%, at least about 350%, at least about 375%, at least about 400%, at least about 425%, at least about 450%, at least about 475%, at least about 500%, at least about 525%, at least about 550%, at least about 575%, at least about 600%, at least about 625%, at least about 650%, at least about 675%, at least about 700%, at least about 725%, at least about 750%, at least about 775%, at least about 800%, at least about 825%, at least about 850%, at least about 875%, at least about 900%, at least about 925%, at least about 950%, at least about 975%, at least about 1000%, at least about 1100%, at least about 1125%, at least about 1150%, at least about 1175%, at least about 1200%, at least about 1225%, at least about 1250%, at least about 1275%, at least about 1300%, at least about 1325%, at least about 1350%, at least about 1375%, at least about 1400%, at least about 1425%, at least about 1450%, at least about 1475%, at least about 1500%, at least about 1525%, at least about 1550%, at least about 1575%, at least about 1600%, at least about 1625%, at least about 1650%, at least about 1675%, at least about 1700%, at least about 1725%, at least about 1750%, at least about 1775%, at least about 1800%, at least about 1825%, at least about 1850%, at least about 1875%, at least about 1900%, at least about 1925%, at least about 1950%, at least about 1975%, or at least about 2000% higher than the yield of a first polypeptide when not expressed as a fusion protein.

33. The method of claim 4, wherein the yield of the first polypeptide is greater than 75 mg per liter.

34. The method of claim 4, wherein the yield of the first polypeptide is about 300% higher than the yield of a first polypeptide that is not expressed as a fusion protein.

35. The method of any one of claims 1-34, wherein the fusion protein is expressed in a host cell selected from a mammalian cell, a bacterial cell, a fungal cell, a yeast cell, and a plant cell.

36. The method of any one of claims 1-35, wherein the first polypeptide is:
i) an enzyme, or catalytic fragment thereof;
ii) an antibody or antigen-binding fragment thereof;
iii) a signaling molecule, or a fragment thereof;
iv) a structural protein, or a fragment thereof;
v) a hormone, or a fragment or derivative thereof;
vi) a nucleic acid binding protein, or a fragment or derivative thereof;
vii) a therapeutic, or a fragment thereof;
viii) a carrier protein, or a fragment thereof;
ix) a cytokine, or a fragment thereof; or
x) a toxin, or a fragment thereof.

37. The method of any one of claims 1-36, wherein the first polypeptide is a mammalian polypeptide.

38. The method of any one of claims 1-36, wherein the first polypeptide is a viral polypeptide.

39. The method of any one of claims 1-36, wherein the first polypeptide is a bacterial polypeptide.

40. The method of any one of claims 1-36, wherein the first polypeptide is a toxin.

41. The method of any one of claims 1-36, wherein the first polypeptide is an antigenic polypeptide.

42. The method of any one of claims 1-41, wherein the first polypeptide is an enzyme capable of performing one or more steps involved in protein synthesis or modification.

43. The method of any one of claims 1-41, wherein the first polypeptide is an enzyme capable of performing one or more steps involved in DNA synthesis or modification.

44. The method of any one of claims 1-41, wherein the first polypeptide is an enzyme capable of performing one or more steps involved in RNA synthesis or modification.

45. The method of any one of claims 1-41, wherein the first polypeptide is selected from the cluster of differentiation 4 (CD4), the Z-domain of Staphylococcus protein A (SpA Z-domain), low-density lipoprotein receptor (LDLR), albumin binding polypeptide (ABD), coxsackievirus and adenovirus receptor (CAR), fibronectin type III (FN3), poly(A) binding protein (PABP), Z-DNA binding protein 1 (ZBP1), or a fragment or derivative thereof.

46. The method of any one of claims 1-41, wherein the first polypeptide is a polypeptide isolated or derived from SARS-COV-2.

47. The method of claim 46, wherein the first polypeptide is the SARS-COV-2 spike protein, or a fragment or derivative thereof.

48. The method of any one of claims 1-47, wherein the first polypeptide with phase behavior is an elastin-like polypeptide (ELP) or a resilin-like polypeptide (RLP).

49. The method of any one of claims 1-47, wherein the polypeptide with phase behavior comprises a pentapeptide repeat having the sequence (Val-Pro-Gly-Xaa-Gly)ₙ (SEQ ID NO: 10), or a randomized, scrambled analog thereof; wherein Xaa can be any amino acid except proline, wherein n is an integer between 1 and 360, inclusive of endpoints.

50. The method of any one of claims 1-48, wherein the polypeptide with phase behavior comprises an amino acid sequence selected from:
a.
(SEQ ID NO: 1)
(GRGDSPY)ₙ
b.
(SEQ ID NO: 2)
(GRGDSPH)ₙ
c.
(SEQ ID NO: 3)
(GRGDSPV)ₙ
d.
(SEQ ID NO: 4)
(GRGDSPYG)ₙ
e.
(SEQ ID NO: 5)
(RPLGYDS)ₙ
f.
(SEQ ID NO: 6)
(RPAGYDS)ₙ
g.
(SEQ ID NO: 7)
(GRGDSYP)ₙ
h.
(SEQ ID NO: 8)
(GRGDSPYQ)ₙ
i.
(SEQ ID NO: 9)
(GRGNSPYG)ₙ
j.
(SEQ ID NO: 11)
(GVGVP)ₙ;
k.
(SEQ ID NO: 12)
(GVGVPGLGVPGVGVPGLGVPGVGVP)ₘ;
l.
(SEQ ID NO: 13)
(GVGVPGVGVPGAGVPGVGVPGVGVP)ₘ;
m.
(SEQ ID NO: 14)
(GVGVPGWGVPGVGVPGWGVPGVGVP)ₘ;
n.
(SEQ ID NO: 15)
(GVGVPGVGVPGVGVPGVGVPGVGVPGVGVPGEGVPGF
GVPGVGVP)ₘ;
o.
(SEQ ID NO: 16)
(GVGVPGVGVPGVGVPGVGVPGVGVPGVGVPGKGVPGF
GVPGVGVP)ₘ;
and
p.
(SEQ ID NO: 17)
(GAGVPGVGVPGAGVPGVGVPGAGVP)ₘ;
or a randomized, scrambled analog thereof;
wherein:
n is an integer in the range of 20-360, inclusive of endpoints; and
m is an integer in the range of 4-25, inclusive of endpoints.

51. The method of any one of claims 1-48, wherein the polypeptide with phase behavior comprises an amino acid sequence selected from:
(SEQ ID NO: 143)
(GVGVP)ₘ;
(SEQ ID NO: 148)
(ZZPXXXXGZ)ₘ;
(SEQ ID NO: 149)
(ZZPXGZ)ₘ;
(SEQ ID NO: 150)
(ZZPXXGZ)ₘ;
or
(SEQ ID NO: 151)
(ZZPXXXGZ)ₘ,
wherein m is an integer between 10 and 160, inclusive of endpoints,
wherein X if present is any amino acid except proline or glycine, and
wherein Z if present is any amino acid.

52. The method of any one of claims 1-48, wherein the polypeptide with phase behavior comprises an amino acid sequence selected from:
(a)
(SEQ ID NO: 144)
(GVGVPGVGVPGAGVPGVGVPGVGVP)ₘ;
or
(b)
(SEQ ID NO: 146)
(GVGVPGVGVPGLGVPGVGVPGVGVP)ₘ;
wherein m is an integer between 2 and 32, inclusive of endpoints.

53. The method of any one of claims 1-48, wherein the polypeptide with phase behavior comprises an amino acid sequence selected from:
(a) (GVGVPGVGVPGAGVPGVGVPGVGVP)ₘ (SEQ ID NO: 144), wherein m is 8 or 16;
(b) (GVGVPGAGVP)ₘ (SEQ ID NO: 145), wherein m is an integer between 5 and 80, inclusive of endpoints; or
(c) (GXGVP)ₘ (SEQ ID NO: 147),
wherein m is an integer between 10 and 160, inclusive of endpoints, and
wherein X for each repeat is independently selected from the group consisting of glycine, alanine, valine, isoleucine, leucine, phenylalanine, tyrosine, tryptophan, lysine, arginine, aspartic acid, glutamic acid, and serine.

54. The method of any one of claims 1-48, wherein the polypeptide with phase behavior comprises an amino acid of SEQ ID NO: 88 or a sequence of (GVGVPGLGVPGVGVPGLGVPGVGVP)ₘ, wherein m is 16 (SEQ ID NO: 12).

55. The method of any one of claims 1-54, wherein the fusion protein comprises a linker that links the first polypeptide and the second polypeptide.

56. The method of claim 55, wherein the linker is cleavable.

57. The method of claim 55, wherein the linker comprises a protease cleavage site.

58. The method of claim 55, wherein the linker is a self-cleaving peptide.

59. The method of claim 55, wherein the linker is selected from the group consisting of:
i)
(SEQ ID NO: 141)
(GₓS)ₙ,
ii)
(SEQ ID NO: 142)
(SₓG)ₙ,
iv)
(SEQ ID NO: 19)
(GGGGS)ₙ,
and
v)
(SEQ ID NO: 48)
(G)ₙ;
wherein x is an integer in the range of 1 to 6, and
n is an integer in the range of 1 to 30.

60. The method of claim 55, wherein the linker is selected from GKSSGSGSESKS (SEQ ID NO: 157), GSTSGSGKSSEGKG (SEQ ID NO: 158), GSTSGSGKSSEGSGSTKG (SEQ ID NO: 159, GSTSGSGKPGSGEGSTKG (SEQ ID NO: 160), EGKSSGSGSESKEF (SEQ ID NO: 161, SRSSG (SEQ ID NO: 162), and SGSSC (SEQ ID NO: 163).

61. The method of any one of claims 1-60, wherein the fusion protein comprises from N-terminus to C-terminus, the first polypeptide and the second polypeptide.

62. The method of any one of claims 1-60, wherein the fusion protein comprises from N-terminus to C-terminus, the second polypeptide and the first polypeptide.

63. The method of any one of claims 55-60, wherein the protein comprises from N-terminus to C-terminus, the first polypeptide, the linker, and the second polypeptide.

64. The method of any one of claims 55-60, wherein the protein comprises from N-terminus to C-terminus, the second polypeptide, the linker, and the first polypeptide.

65. The method of any one of claim 1-44 or 48-64, wherein the first polypeptide comprises a nucleic acid binding protein (NBP).

66. The method of claim 65, wherein the NBP binds to DNA.

67. The method of claim 65, wherein the NBP binds to RNA.

68. The method of claim 66, wherein the DNA is single stranded.

69. The method of claim 66, wherein the DNA is double stranded.

70. The method of claim 65, wherein the RNA is single stranded.

71. The method of claim 65, wherein the RNA is double stranded.

72. The method of claim 64, wherein the RNA is messenger RNA (mRNA), transfer RNA (tRNA), microRNA, ribosomal RNA (rRNA), small nuclear RNA (snRNA), small interfering RNA (siRNA), or heterogenous nuclear RNA (hnRNA).

73. The method of claim 65, 67, 70 or 72, wherein the NBP binds to an mRNA cap or a poly A tail.

74. The method of claim 65, wherein the NBP is a T7 RNA polymerase, Rnase inhibitor, 2′-O-Methyltransferase, Inorganic Pyrophosphatase, Poly(A) Polymerase, DNase I, Calf intestinal phosphatase, Antarctic phosphatase, D1 subunit of the Vaccinia virus mRNA capping enzyme, Guanine-7-methyltransferase (found in D1 subunit of the Vaccinia virus mRNA capping enzyme), Guanylyltransferase (found in D1 subunit of the Vaccinia virus mRNA capping enzyme), RNA triphosphatase (found in D1 subunit of the Vaccinia virus mRNA capping enzyme), and D12 subunit of vaccinia virus mRNA capping enzyme, a stem-loop binding protein, a heterogenous ribonucleoprotein (hnRNP), GroEL, Edc3, DHX9, Xrn1, Dcp1, Dcp2, LAF-1, MEG-1, MEG-3, ASF/SF2 splicing factor, serine/arginine rich splicing factor 4 (SRp75), the serine and arginine rich splicing factor 1 (SRSF1), the L3 ribosomal protein, the L4 ribosomal protein, the L13 ribosomal protein, the L20 ribosomal protein, the L22 ribosomal protein, the L24 ribosomal protein, the L24e ribosomal protein, the S12 ribosomal protein, the S14 ribosomal protein, and the eukaryotic initiation factor 4E-binding protein 1 (4EBP1), Tat, Rev, RSG-1.2 peptide, poly(A)-binding protein (PABP), eukaryotic translation initiation factor 4E (eIF4E), eukaryotic translation initiation factor3 Subunit D (eIF3D), heterogenous nuclear ribonucleoproteins (hnRNPs), RNA-specific adenosine deaminase 1 (ADAR1), RNA-specific adenosine deaminase 2 (ADAR2), CspB from Bacillus subtilis (Bscscp), Y-box protein 1 cold shock domain (YB1-CSD), a Fox-1 protein (FOX1), poly(A)-binding protein (PABP), Staufen protein, TIS11d, zinc finger protein (ZNF), Z-DNA binding protein 1 (ZBP1), retinoic acid-inducible gene-I (RIG-I) like protein, toll like receptor 7 (TLR7), toll like receptor 8 (TLR3), toll like receptor 8 (TLR8), retinoic acid-inducible gene I (RIG-I), melanoma differentiation-associated protein 5 (MDA5), interferon induced protein with tetratricopeptide repeats 1 (IFIT1), protein kinase R (PKR), an oligoadenylate synthase-like (OASL) protein (e.g., OAS1, OAS2, OAS3, or OASL), ribonuclease E (RNASE E), gamma-interferon-inducible protein Ifi-16 (IF116), or cyclic GMP-AMP synthase (cGAS).

75. The method of claim 65, wherein the NBP comprises one or more of the following domains: a short linear motif (SLIM), an RG[G] repeat, an RGG repeat, a RS/RG rich domain, a K/R basic patch, a molecular recognition feature, a low complexity sequence, an RNA recognition motif, a double-stranded RNA binding domain, a K homology domain, a zinc finger domain (e.g., CCHH ZF domain, a CCCC (Ran-BP2) domain, a CCCH ZF domain), an RGG domain, a Pumillo family domain, a pentatricopeptide domain, a cold shock domain, a helicase domain, a La motif, a Piwi-Argonaute-Zwille (PAZ) domain, a P-element induced wimpy testis, a pseudouridine synthase and archaeosine transglycosylate (PUA), a Pumillo-like repeat (PUM), a ribosomal S1-like (S1), Sm and Like-Sm (Sm/Lsm) repeat, thiouridine synthases and RNA methylases and pseudouridine synthases (THUMP), or a domain with YT521-B homology.

76. A method for performing an enzymatic process on a nucleic acid substrate, the method comprising:
(i) providing a first fusion protein comprising a first enzyme and a first polypeptide having a phase behavior; and
(ii) applying a first environmental factor, which allows the first enzyme to contact the substrate.

77. The method of claim 76, comprising:
(iii) providing a second fusion protein comprising a second enzyme and a second polypeptide having phase behavior;
(iv) applying a second environmental factor, which allows the second enzyme to contact the substrate.

78. The method of claim 76, wherein the method further comprises:
(iii) applying a third environmental factor, which separates the first enzyme from the substrate.

79. The method of claim 77, wherein the method further comprises at least one of:
(v) applying a third environmental factor, which separates the first enzyme from the substrate.
(vi) applying a fourth environmental factor, which separates the second enzyme from the substrate.

80. The method of any one of claims 76-79, wherein the first, second, third, and fourth environmental factor are independently selected from:
a. a change in one or more of temperature, pH, salt concentration or pressure;
b. the addition of one or more surfactants, cofactors, vitamins, molecular crowding agents, enzymes, denaturing agents; or
c. the application of electromagnetic waves.

81. The method of any one of claims 76-80, wherein the first enzyme, second enzyme, or both comprises a nucleic acid binding protein (NBP).

82. The method of claim 81, wherein the first enzyme comprises a NBP that binds to DNA.

83. The method of claim 81, wherein the first enzyme comprises a NBP that binds to RNA.

84. The method of any one of claims 81-83, wherein the second enzyme comprises a NBP that binds to DNA.

85. The method of any one of claims 81-83, wherein the second enzyme comprises a NBP that binds to RNA.

86. The method of any one of claims 81 or 82, wherein the first enzyme is capable of performing one or more steps involved in DNA synthesis or modification.

87. The method of any one of claim 81, 82, or 86, wherein the second enzyme is capable of performing one or more steps involved in DNA synthesis or modification.

88. The method of any one of claim 81 or 83, wherein the first enzyme is capable of performing one or more steps involved in RNA synthesis or modification.

89. The method of any one of claim 81, 83, or 88, wherein the second enzyme is capable of performing one or more steps involved in RNA synthesis or modification.

90. The method of any one of claim 81, 82, 84, 86, or 87, wherein the DNA is single stranded.

91. The method of any one of claim 81, 82, 84, 86, or 87, wherein the DNA is double stranded.

92. The method of any one of claim 81, 83, 85, 88, or 89, wherein the RNA is single stranded.

93. The method of any one of claim 81, 83, 85, 88, or 89, wherein the RNA is double stranded.

94. The method of any one of claim 81, 83, 85, 88, 89, 92, or 93, wherein the RNA is messenger RNA (mRNA), transfer RNA (tRNA), microRNA, ribosomal RNA (rRNA), small nuclear RNA (snRNA), small interfering RNA (siRNA), or heterogenous nuclear RNA (hnRNA).

95. The method of claim 81, wherein the NBP binds to an mRNA cap or a poly A tail.

96. The method of any one of claims 81-95, wherein the NBP is a T7 RNA polymerase, Rnase inhibitor, 2′-O-Methyltransferase, Inorganic Pyrophosphatase, Poly(A) Polymerase, DNase I, Calf intestinal phosphatase, Antarctic phosphatase, D1 subunit of the Vaccinia virus mRNA capping enzyme, Guanine-7-methyltransferase (found in D1 subunit of the Vaccinia virus mRNA capping enzyme), Guanylyltransferase (found in D1 subunit of the Vaccinia virus mRNA capping enzyme), RNA triphosphatase (found in D1 subunit of the Vaccinia virus mRNA capping enzyme), and D12 subunit of vaccinia virus mRNA capping enzyme, a stem-loop binding protein, a heterogenous ribonucleoprotein (hnRNP), GroEL, Edc3, DHX9, Xrn1, Dcp1, Dcp2, LAF-1, MEG-1, MEG-3, ASF/SF2 splicing factor, serine/arginine rich splicing factor 4 (SRp75), the serine and arginine rich splicing factor 1 (SRSF1), the L3 ribosomal protein, the L4 ribosomal protein, the L13 ribosomal protein, the L20 ribosomal protein, the L22 ribosomal protein, the L24 ribosomal protein, the L24e ribosomal protein, the S12 ribosomal protein, the S14 ribosomal protein, and the eukaryotic initiation factor 4E-binding protein 1 (4EBP1), Tat, Rev, RSG-1.2 peptide, poly(A)-binding protein (PABP), eukaryotic translation initiation factor 4E (eIF4E), eukaryotic translation initiation factor3 Subunit D (eIF3D), heterogenous nuclear ribonucleoproteins (hnRNPs), RNA-specific adenosine deaminase 1 (ADAR1), RNA-specific adenosine deaminase 2 (ADAR2), CspB from Bacillus subtilis (Bscscp), Y-box protein 1 cold shock domain (YB1-CSD), a Fox-1 protein (FOX1), poly(A)-binding protein (PABP), Staufen protein, TIS11d, zinc finger protein (ZNF), Z-DNA binding protein 1 (ZBP1), retinoic acid-inducible gene-I (RIG-I) like protein, toll like receptor 7 (TLR7), toll like receptor 8 (TLR3), toll like receptor 8 (TLR8), retinoic acid-inducible gene I (RIG-I), melanoma differentiation-associated protein 5 (MDA5), interferon induced protein with tetratricopeptide repeats 1 (IFIT1), protein kinase R (PKR), an oligoadenylate synthase-like (OASL) protein (e.g., OAS1, OAS2, OAS3, or OASL), ribonuclease E (RNASE E), gamma-interferon-inducible protein Ifi-16 (IF116), or cyclic GMP-AMP synthase (cGAS).

97. The method of claim 81, wherein the NBP comprises one or more of the following domains: a short linear motif (SLIM), an RG[G] repeat, an RGG repeat, a RS/RG rich domain, a K/R basic patch, a molecular recognition feature, a low complexity sequence, an RNA recognition motif, a double-stranded RNA binding domain, a K homology domain, a zinc finger domain (e.g., CCHH ZF domain, a CCCC (Ran-BP2) domain, a CCCH ZF domain), an RGG domain, a Pumillo family domain, a pentatricopeptide domain, a cold shock domain, a helicase domain, a La motif, a Piwi-Argonaute-Zwille (PAZ) domain, a P-element induced wimpy testis, a pseudouridine synthase and archaeosine transglycosylate (PUA), a Pumillo-like repeat (PUM), a ribosomal S1-like (S1), Sm and Like-Sm (Sm/Lsm) repeat, thiouridine synthases and RNA methylases and pseudouridine synthases (THUMP), or a domain with YT521-B homology.

98. The method of any one of claims 81-97, wherein the first polypeptide with phase behavior and the second polypeptide with phase behavior comprise the same sequence.

99. The method of any one of claims 81-97, wherein the first polypeptide with phase behavior and the second polypeptide with phase behavior comprise different sequences.

100. The method of any one of claims 81-99, wherein the first polypeptide with phase behavior is an elastin-like polypeptide (ELP) and the second polypeptide with phase behavior is a resilin-like polypeptide (RLP).

101. The method of any one of claims 81-99, wherein the first polypeptide with phase behavior is a resilin-like polypeptide (RLP) and the second polypeptide with phase behavior is a an elastin-like polypeptide (ELP).

102. The method of any one of claims 81-101, wherein the first and/or second polypeptide with phase behavior independently comprises a pentapeptide repeat having the sequence (Val-Pro-Gly-Xaa-Gly), (SEQ ID NO: 10), or a randomized, scrambled analog thereof; wherein Xaa can be any amino acid except proline, wherein n is an integer between 1 and 360, inclusive of endpoints.

103. The method of any one of claims 81-101, wherein the first and/or second polypeptide with phase behavior comprises an amino acid sequence independently selected from:
a.
(SEQ ID NO: 1)
(GRGDSPY)ₙ
b.
(SEQ ID NO: 2)
(GRGDSPH)ₙ
c.
(SEQ ID NO: 3)
(GRGDSPV)ₙ
d.
(SEQ ID NO: 4)
(GRGDSPYG)ₙ
e.
(SEQ ID NO: 5)
(RPLGYDS)ₙ
f.
(SEQ ID NO: 6)
(RPAGYDS)ₙ
g.
(SEQ ID NO: 7)
(GRGDSYP)ₙ
h.
(SEQ ID NO: 8)
(GRGDSPYQ)ₙ
i.
(SEQ ID NO: 9)
(GRGNSPYG)ₙ
j.
(SEQ ID NO: 11)
(GVGVP)ₙ;
k.
(SEQ ID NO: 12)
(GVGVPGLGVPGVGVPGLGVPGVGVP)ₘ;
l.
(SEQ ID NO: 13)
(GVGVPGVGVPGAGVPGVGVPGVGVP)ₘ;
m.
(SEQ ID NO: 14)
(GVGVPGWGVPGVGVPGWGVPGVGVP)ₘ;
n.
(SEQ ID NO: 15)
(GVGVPGVGVPGVGVPGVGVPGVGVPGVGVPGEGVPGFGVPGVGVP)ₘ;
o.
(SEQ ID NO: 16)
(GVGVPGVGVPGVGVPGVGVPGVGVPGVGVPGKGVPGFGVPGVGVP)ₘ;
and
p.
(SEQ ID NO: 17)
(GAGVPGVGVPGAGVPGVGVPGAGVP)ₘ;
or a randomized, scrambled analog thereof;
wherein:
n is an integer in the range of 20-360, inclusive of endpoints; and
m is an integer in the range of 4-25, inclusive of endpoints.

104. The method of any one of claims 81-101, wherein the first and/or second polypeptide with phase behavior comprises an amino acid sequence independently selected from:
(SEQ ID NO: 143)
(GVGVP)ₘ;
(SEQ ID NO: 148)
(ZZPXXXXGZ)ₘ;
(SEQ ID NO: 149)
(ZZPXGZ)ₘ;
(SEQ ID NO: 150)
(ZZPXXGZ)ₘ;
or
(SEQ ID NO: 151)
(ZZPXXXGZ)ₘ,
wherein m is an integer between 10 and 160, inclusive of endpoints,
wherein X if present is any amino acid except proline or glycine, and
wherein Z if present is any amino acid.

105. The method of any one of claims 81-101, wherein the first and/or second polypeptide with phase behavior comprises an amino acid sequence independently selected from:
(a)
(SEQ ID NO: 144)
(GVGVPGVGVPGAGVPGVGVPGVGVP)ₘ;
or
(b)
(SEQ ID NO: 146)
(GVGVPGVGVPGLGVPGVGVPGVGVP)ₘ;
wherein m is an integer between 2 and 32, inclusive of endpoints.

106. The method of any one of claims 81-101, wherein the first and/or second polypeptide with phase behavior comprises an amino acid sequence independently selected from:
(a) (GVGVPGVGVPGAGVPGVGVPGVGVP)ₘ (SEQ ID NO: 144), wherein m is 8 or 16;
(b) (GVGVPGAGVP)ₘ (SEQ ID NO: 145), wherein m is an integer between 5 and 80, inclusive of endpoints; or
(c) (GXGVP)ₘ (SEQ ID NO: 147),
wherein m is an integer between 10 and 160, inclusive of endpoints, and
wherein X for each repeat is independently selected from the group consisting of glycine, alanine, valine, isoleucine, leucine, phenylalanine, tyrosine, tryptophan, lysine, arginine, aspartic acid, glutamic acid, and serine.

107. The method of any one of claims 81-101, wherein the first and/or second polypeptide with phase behavior comprises an amino acid of SEQ ID NO: 88 or a sequence of (GVGVPGLGVPGVGVPGLGVPGVGVP)ₘ, wherein m is 16 (SEQ ID NO: 12).

108. The method of any one of claims 81-107, wherein the first fusion protein comprises a linker that links the first polypeptide and the second polypeptide.

109. The method of any one of claims 82-108, wherein the second fusion protein comprises a linker that links the first polypeptide and the second polypeptide.

110. The method of claim 108 or 109, wherein the linker is cleavable.

111. The method of claim 108 or 109, wherein the linker comprises a protease cleavage site.

112. The method of claim 108 or 109, wherein the linker is a self-cleaving peptide.

113. The method of claim 108 or 109, wherein the linker is independently selected from the group consisting of:
i)
(SEQ ID NO: 141)
(GₓS)ₙ,
ii)
(SEQ ID NO: 142)
(SₓG)ₙ,
iv)
(SEQ ID NO: 19)
(GGGGS)ₙ,
and
v)
(SEQ ID NO: 48)
(G)ₙ;
wherein x is an integer in the range of 1 to 6, and
n is an integer in the range of 1 to 30.

114. The method of claim 108 or 109, wherein the linker is selected from GKSSGSGSESKS (SEQ ID NO: 157), GSTSGSGKSSEGKG (SEQ ID NO: 158), GSTSGSGKSSEGSGSTKG (SEQ ID NO: 159), GSTSGSGKPGSGEGSTKG (SEQ ID NO: 160), EGKSSGSGSESKEF (SEQ ID NO: 161), SRSSG (SEQ ID NO: 162), and SGSSC (SEQ ID NO: 163).

115. The method of any one of claims 81-114, wherein the first fusion protein and/or second fusion protein comprises from N-terminus to C-terminus, the first polypeptide and the second polypeptide.

116. The method of any one of claims 81-114, wherein the first fusion protein and/or second fusion protein comprises from N-terminus to C-terminus, the second polypeptide and the first polypeptide.

117. The method of any one of claims 108-114, wherein the first fusion protein and/or second fusion protein comprises from N-terminus to C-terminus, the first polypeptide, the linker, and the second polypeptide.

118. The method of any one of claims 108-114, wherein the first fusion protein and/or second fusion protein comprises from N-terminus to C-terminus, the second polypeptide, the linker, and the first polypeptide.

The application's sequence listing, which the Patent Office published only in electronic form, follows.

SEQUENCE LISTING (187 sequences)

SEQ ID NO: 1 - protein, 3500 aa, Artificial Sequence
  resilin-like polypeptide
  MISC_FEATURE (8)..(3500): May be present or absent in groups of the repeat unit Gly Arg Gly Asp Ser Pro Tyr
GRGDSPYGRGDSPYGRGDSPYGRGDSPYGRGDSPYGRGDSPYGRGDSPYGRGDSPYGRGDSPYGRGDSPYGRGDSPYGRGDSPYGRGDSPYGRGDSPYGRGDSPYGRGDSPYGRGDSPYGRGDSPYGRGDSPYGRGDSPYGRGDSPYGRGDSPYGRGDSPYGRGDSPYGRGDSPYGRGDSPYGRGDSPYGRGDSPYGRGDSPYGRGDSPYGRGDSPYGRGDSPYGRGDSPYGRGDSPYGRGDSPYGRGDSPYGRGDSPYGRGDSPYGRGDSPYGRGDSPYGRGDSPYGRGDSPYGRGDSPYGRGDSPYGRGDSPYGRGDSPYGRGDSPYGRGDSPYGRGDSPYGRGDSPYGRGDSPYGRGDSPYGRGDSPYGRGDSPYGRGDSPYGRGDSPYGRGDSPYGRGDSPYGRGDSPYGRGDSPYGRGDSPYGRGDSPYGRGDSPYGRGDSPYGRGDSPYGRGDSPYGRGDSPYGRGDSPYGRGDSPYGRGDSPYGRGDSPYGRGDSPYGRGDSPYGRGDSPYGRGDSPYGRGDSPYGRGDSPYGRGDSPYGRGDSPYGRGDSPYGRGDSPYGRGDSPYGRGDSPYGRGDSPYGRGDSPYGRGDSPYGRGDSPYGRGDSPYGRGDSPYGRGDSPYGRGDSPYGRGDSPYGRGDSPYGRGDSPYGRGDSPYGRGDSPYGRGDSPYGRGDSPYGRGDSPYGRGDSPYGRGDSPYGRGDSPYGRGDSPYGRGDSPYGRGDSPYGRGDSPYGRGDSPYGRGDSPYGRGDSPYGRGDSPYGRGDSPYGRGDSPYGRGDSPYGRGDSPYGRGDSPYGRGDSPYGRGDSPYGRGDSPYGRGDSPYGRGDSPYGRGDSPYGRGDSPYGRGDSPYGRGDSPYGRGDSPYGRGDSPYGRGDSPYGRGDSPYGRGDSPYGRGDSPYGRGDSPYGRGDSPYGRGDSPYGRGDSPYGRGDSPYGRGDSPYGRGDSPYGRGDSPYGRGDSPYGRGDSPYGRGDSPYGRGDSPYGRGDSPYGRGDSPYGRGDSPYGRGDSPYGRGDSPYGRGDSPYGRGDSPYGRGDSPYGRGDSPYGRGDSPYGRGDSPYGRGDSPYGRGDSPYGRGDSPYGRGDSPYGRGDSPYGRGDSPYGRGDSPYGRGDSPYGRGDSPYGRGDSPYGRGDSPYGRGDSPYGRGDSPYGRGDSPYGRGDSPYGRGDSPYGRGDSPYGRGDSPYGRGDSPYGRGDSPYGRGDSPYGRGDSPYGRGDSPYGRGDSPYGRGDSPYGRGDSPYGRGDSPYGRGDSPYGRGDSPYGRGDSPYGRGDSPYGRGDSPYGRGDSPYGRGDSPYGRGDSPYGRGDSPYGRGDSPYGRGDSPYGRGDSPYGRGDSPYGRGDSPYGRGDSPYGRGDSPYGRGDSPYGRGDSPYGRGDSPYGRGDSPYGRGDSPYGRGDSPYGRGDSPYGRGDSPYGRGDSPYGRGDSPYGRGDSPYGRGDSPYGRGDSPYGRGDSPYGRGDSPYGRGDSPYGRGDSPYGRGDSPYGRGDSPYGRGDSPYGRGDSPYGRGDSPYGRGDSPYGRGDSPYGRGDSPYGRGDSPYGRGDSPYGRGDSPYGRGDSPYGRGDSPYGRGDSPYGRGDSPYGRGDSPYGRGDSPYGRGDSPYGRGDSPYGRGDSPYGRGDSPYGRGDSPYGRGDSPYGRGDSPYGRGDSPYGRGDSPYGRGDSPYGRGDSPYGRGDSPYGRGDSPYGRGDSPYGRGDSPYGRGDSPYGRGDSPYGRGDSPYGRGDSPYGRGDSPYGRGDSPYGRGDSPYGRGDSPYGRGDSPYGRGDSPYGRGDSPYGRGDSPYGRGDSPYGRGDSPYGRGDSPYGRGDSPYGRGDSPYGRGDSPYGRGDSPYGRGDSPYGRGDSPYGRGDSPYGRGDSPYGRGDSPYGRGDSPYGRGDSPYGRGDSPYGRGDSPYGRGDSPYGRGDSPYGRGDSPYGRGDSPYGRGDSPYGRGDSPYGRGDSPYGRGDSPYGRGDSPYGRGDSPYGRGDSPYGRGDSPYGRGDSPYGRGDSPYGRGDSPYGRGDSPYGRGDSPYGRGDSPYGRGDSPYGRGDSPYGRGDSPYGRGDSPYGRGDSPYGRGDSPYGRGDSPYGRGDSPYGRGDSPYGRGDSPYGRGDSPYGRGDSPYGRGDSPYGRGDSPYGRGDSPYGRGDSPYGRGDSPYGRGDSPYGRGDSPYGRGDSPYGRGDSPYGRGDSPYGRGDSPYGRGDSPYGRGDSPYGRGDSPYGRGDSPYGRGDSPYGRGDSPYGRGDSPYGRGDSPYGRGDSPYGRGDSPYGRGDSPYGRGDSPYGRGDSPYGRGDSPYGRGDSPYGRGDSPYGRGDSPYGRGDSPYGRGDSPYGRGDSPYGRGDSPYGRGDSPYGRGDSPYGRGDSPYGRGDSPYGRGDSPYGRGDSPYGRGDSPYGRGDSPYGRGDSPYGRGDSPYGRGDSPYGRGDSPYGRGDSPYGRGDSPYGRGDSPYGRGDSPYGRGDSPYGRGDSPYGRGDSPYGRGDSPYGRGDSPYGRGDSPYGRGDSPYGRGDSPYGRGDSPYGRGDSPYGRGDSPYGRGDSPYGRGDSPYGRGDSPYGRGDSPYGRGDSPYGRGDSPYGRGDSPYGRGDSPYGRGDSPYGRGDSPYGRGDSPYGRGDSPYGRGDSPYGRGDSPYGRGDSPYGRGDSPYGRGDSPYGRGDSPYGRGDSPYGRGDSPYGRGDSPYGRGDSPYGRGDSPYGRGDSPYGRGDSPYGRGDSPYGRGDSPYGRGDSPYGRGDSPYGRGDSPYGRGDSPYGRGDSPYGRGDSPYGRGDSPYGRGDSPYGRGDSPYGRGDSPYGRGDSPYGRGDSPYGRGDSPYGRGDSPYGRGDSPYGRGDSPYGRGDSPYGRGDSPYGRGDSPYGRGDSPYGRGDSPYGRGDSPYGRGDSPYGRGDSPYGRGDSPYGRGDSPYGRGDSPYGRGDSPYGRGDSPYGRGDSPYGRGDSPYGRGDSPYGRGDSPYGRGDSPYGRGDSPYGRGDSPYGRGDSPYGRGDSPYGRGDSPYGRGDSPYGRGDSPYGRGDSPYGRGDSPYGRGDSPYGRGDSPYGRGDSPYGRGDSPYGRGDSPYGRGDSPYGRGDSPYGRGDSPYGRGDSPYGRGDSPYGRGDSPYGRGDSPYGRGDSPYGRGDSPYGRGDSPYGRGDSPYGRGDSPYGRGDSPYGRGDSPYGRGDSPYGRGDSPYGRGDSPYGRGDSPYGRGDSPYGRGDSPYGRGDSPYGRGDSPYGRGDSPYGRGDSPYGRGDSPYGRGDSPYGRGDSPYGRGDSPYGRGDSPYGRGDSPYGRGDSPYGRGDSPYGRGDSPYGRGDSPYGRGDSPYGRGDSPYGRGDSPYGRGDSPYGRGDSPYGRGDSPYGRGDSPYGRGDSPYGRGDSPYGRGDSPYGRGDSPYGRGDSPYGRGDSPYGRGDSPYGRGDSPYGRGDSPYGRGDSPYGRGDSPYGRGDSPYGRGDSPYGRGDSPYGRGDSPYGRGDSPYGRGDSPYGRGDSPYGRGDSPYGRGDSPYGRGDSPYGRGDSPY

SEQ ID NO: 2 - protein, 3500 aa, Artificial Sequence
  resilin-like polypeptide
  MISC_FEATURE (8)..(3500): May be present or absent in groups of the repeat unit Gly Arg Gly Asp Ser Pro His
GRGDSPHGRGDSPHGRGDSPHGRGDSPHGRGDSPHGRGDSPHGRGDSPHGRGDSPHGRGDSPHGRGDSPHGRGDSPHGRGDSPHGRGDSPHGRGDSPHGRGDSPHGRGDSPHGRGDSPHGRGDSPHGRGDSPHGRGDSPHGRGDSPHGRGDSPHGRGDSPHGRGDSPHGRGDSPHGRGDSPHGRGDSPHGRGDSPHGRGDSPHGRGDSPHGRGDSPHGRGDSPHGRGDSPHGRGDSPHGRGDSPHGRGDSPHGRGDSPHGRGDSPHGRGDSPHGRGDSPHGRGDSPHGRGDSPHGRGDSPHGRGDSPHGRGDSPHGRGDSPHGRGDSPHGRGDSPHGRGDSPHGRGDSPHGRGDSPHGRGDSPHGRGDSPHGRGDSPHGRGDSPHGRGDSPHGRGDSPHGRGDSPHGRGDSPHGRGDSPHGRGDSPHGRGDSPHGRGDSPHGRGDSPHGRGDSPHGRGDSPHGRGDSPHGRGDSPHGRGDSPHGRGDSPHGRGDSPHGRGDSPHGRGDSPHGRGDSPHGRGDSPHGRGDSPHGRGDSPHGRGDSPHGRGDSPHGRGDSPHGRGDSPHGRGDSPHGRGDSPHGRGDSPHGRGDSPHGRGDSPHGRGDSPHGRGDSPHGRGDSPHGRGDSPHGRGDSPHGRGDSPHGRGDSPHGRGDSPHGRGDSPHGRGDSPHGRGDSPHGRGDSPHGRGDSPHGRGDSPHGRGDSPHGRGDSPHGRGDSPHGRGDSPHGRGDSPHGRGDSPHGRGDSPHGRGDSPHGRGDSPHGRGDSPHGRGDSPHGRGDSPHGRGDSPHGRGDSPHGRGDSPHGRGDSPHGRGDSPHGRGDSPHGRGDSPHGRGDSPHGRGDSPHGRGDSPHGRGDSPHGRGDSPHGRGDSPHGRGDSPHGRGDSPHGRGDSPHGRGDSPHGRGDSPHGRGDSPHGRGDSPHGRGDSPHGRGDSPHGRGDSPHGRGDSPHGRGDSPHGRGDSPHGRGDSPHGRGDSPHGRGDSPHGRGDSPHGRGDSPHGRGDSPHGRGDSPHGRGDSPHGRGDSPHGRGDSPHGRGDSPHGRGDSPHGRGDSPHGRGDSPHGRGDSPHGRGDSPHGRGDSPHGRGDSPHGRGDSPHGRGDSPHGRGDSPHGRGDSPHGRGDSPHGRGDSPHGRGDSPHGRGDSPHGRGDSPHGRGDSPHGRGDSPHGRGDSPHGRGDSPHGRGDSPHGRGDSPHGRGDSPHGRGDSPHGRGDSPHGRGDSPHGRGDSPHGRGDSPHGRGDSPHGRGDSPHGRGDSPHGRGDSPHGRGDSPHGRGDSPHGRGDSPHGRGDSPHGRGDSPHGRGDSPHGRGDSPHGRGDSPHGRGDSPHGRGDSPHGRGDSPHGRGDSPHGRGDSPHGRGDSPHGRGDSPHGRGDSPHGRGDSPHGRGDSPHGRGDSPHGRGDSPHGRGDSPHGRGDSPHGRGDSPHGRGDSPHGRGDSPHGRGDSPHGRGDSPHGRGDSPHGRGDSPHGRGDSPHGRGDSPHGRGDSPHGRGDSPHGRGDSPHGRGDSPHGRGDSPHGRGDSPHGRGDSPHGRGDSPHGRGDSPHGRGDSPHGRGDSPHGRGDSPHGRGDSPHGRGDSPHGRGDSPHGRGDSPHGRGDSPHGRGDSPHGRGDSPHGRGDSPHGRGDSPHGRGDSPHGRGDSPHGRGDSPHGRGDSPHGRGDSPHGRGDSPHGRGDSPHGRGDSPHGRGDSPHGRGDSPHGRGDSPHGRGDSPHGRGDSPHGRGDSPHGRGDSPHGRGDSPHGRGDSPHGRGDSPHGRGDSPHGRGDSPHGRGDSPHGRGDSPHGRGDSPHGRGDSPHGRGDSPHGRGDSPHGRGDSPHGRGDSPHGRGDSPHGRGDSPHGRGDSPHGRGDSPHGRGDSPHGRGDSPHGRGDSPHGRGDSPHGRGDSPHGRGDSPHGRGDSPHGRGDSPHGRGDSPHGRGDSPHGRGDSPHGRGDSPHGRGDSPHGRGDSPHGRGDSPHGRGDSPHGRGDSPHGRGDSPHGRGDSPHGRGDSPHGRGDSPHGRGDSPHGRGDSPHGRGDSPHGRGDSPHGRGDSPHGRGDSPHGRGDSPHGRGDSPHGRGDSPHGRGDSPHGRGDSPHGRGDSPHGRGDSPHGRGDSPHGRGDSPHGRGDSPHGRGDSPHGRGDSPHGRGDSPHGRGDSPHGRGDSPHGRGDSPHGRGDSPHGRGDSPHGRGDSPHGRGDSPHGRGDSPHGRGDSPHGRGDSPHGRGDSPHGRGDSPHGRGDSPHGRGDSPHGRGDSPHGRGDSPHGRGDSPHGRGDSPHGRGDSPHGRGDSPHGRGDSPHGRGDSPHGRGDSPHGRGDSPHGRGDSPHGRGDSPHGRGDSPHGRGDSPHGRGDSPHGRGDSPHGRGDSPHGRGDSPHGRGDSPHGRGDSPHGRGDSPHGRGDSPHGRGDSPHGRGDSPHGRGDSPHGRGDSPHGRGDSPHGRGDSPHGRGDSPHGRGDSPHGRGDSPHGRGDSPHGRGDSPHGRGDSPHGRGDSPHGRGDSPHGRGDSPHGRGDSPHGRGDSPHGRGDSPHGRGDSPHGRGDSPHGRGDSPHGRGDSPHGRGDSPHGRGDSPHGRGDSPHGRGDSPHGRGDSPHGRGDSPHGRGDSPHGRGDSPHGRGDSPHGRGDSPHGRGDSPHGRGDSPHGRGDSPHGRGDSPHGRGDSPHGRGDSPHGRGDSPHGRGDSPHGRGDSPHGRGDSPHGRGDSPHGRGDSPHGRGDSPHGRGDSPHGRGDSPHGRGDSPHGRGDSPHGRGDSPHGRGDSPHGRGDSPHGRGDSPHGRGDSPHGRGDSPHGRGDSPHGRGDSPHGRGDSPHGRGDSPHGRGDSPHGRGDSPHGRGDSPHGRGDSPHGRGDSPHGRGDSPHGRGDSPHGRGDSPHGRGDSPHGRGDSPHGRGDSPHGRGDSPHGRGDSPHGRGDSPHGRGDSPHGRGDSPHGRGDSPHGRGDSPHGRGDSPHGRGDSPHGRGDSPHGRGDSPHGRGDSPHGRGDSPHGRGDSPHGRGDSPHGRGDSPHGRGDSPHGRGDSPHGRGDSPHGRGDSPHGRGDSPHGRGDSPHGRGDSPHGRGDSPHGRGDSPHGRGDSPHGRGDSPHGRGDSPHGRGDSPHGRGDSPHGRGDSPHGRGDSPHGRGDSPHGRGDSPHGRGDSPHGRGDSPHGRGDSPHGRGDSPHGRGDSPHGRGDSPHGRGDSPHGRGDSPHGRGDSPHGRGDSPHGRGDSPHGRGDSPHGRGDSPHGRGDSPHGRGDSPHGRGDSPHGRGDSPHGRGDSPHGRGDSPHGRGDSPHGRGDSPHGRGDSPHGRGDSPHGRGDSPHGRGDSPHGRGDSPHGRGDSPHGRGDSPHGRGDSPHGRGDSPHGRGDSPHGRGDSPHGRGDSPHGRGDSPHGRGDSPHGRGDSPHGRGDSPHGRGDSPHGRGDSPHGRGDSPHGRGDSPHGRGDSPHGRGDSPHGRGDSPHGRGDSPHGRGDSPHGRGDSPHGRGDSPHGRGDSPHGRGDSPHGRGDSPHGRGDSPHGRGDSPHGRGDSPHGRGDSPH

SEQ ID NO: 3 - protein, 3500 aa, Artificial Sequence
  resilin-like polypeptide
  MISC_FEATURE (8)..(3500): May be present or absent in groups of the repeat unit Gly Arg Gly Asp Ser Pro Val
GRGDSPVGRGDSPVGRGDSPVGRGDSPVGRGDSPVGRGDSPVGRGDSPVGRGDSPVGRGDSPVGRGDSPVGRGDSPVGRGDSPVGRGDSPVGRGDSPVGRGDSPVGRGDSPVGRGDSPVGRGDSPVGRGDSPVGRGDSPVGRGDSPVGRGDSPVGRGDSPVGRGDSPVGRGDSPVGRGDSPVGRGDSPVGRGDSPVGRGDSPVGRGDSPVGRGDSPVGRGDSPVGRGDSPVGRGDSPVGRGDSPVGRGDSPVGRGDSPVGRGDSPVGRGDSPVGRGDSPVGRGDSPVGRGDSPVGRGDSPVGRGDSPVGRGDSPVGRGDSPVGRGDSPVGRGDSPVGRGDSPVGRGDSPVGRGDSPVGRGDSPVGRGDSPVGRGDSPVGRGDSPVGRGDSPVGRGDSPVGRGDSPVGRGDSPVGRGDSPVGRGDSPVGRGDSPVGRGDSPVGRGDSPVGRGDSPVGRGDSPVGRGDSPVGRGDSPVGRGDSPVGRGDSPVGRGDSPVGRGDSPVGRGDSPVGRGDSPVGRGDSPVGRGDSPVGRGDSPVGRGDSPVGRGDSPVGRGDSPVGRGDSPVGRGDSPVGRGDSPVGRGDSPVGRGDSPVGRGDSPVGRGDSPVGRGDSPVGRGDSPVGRGDSPVGRGDSPVGRGDSPVGRGDSPVGRGDSPVGRGDSPVGRGDSPVGRGDSPVGRGDSPVGRGDSPVGRGDSPVGRGDSPVGRGDSPVGRGDSPVGRGDSPVGRGDSPVGRGDSPVGRGDSPVGRGDSPVGRGDSPVGRGDSPVGRGDSPVGRGDSPVGRGDSPVGRGDSPVGRGDSPVGRGDSPVGRGDSPVGRGDSPVGRGDSPVGRGDSPVGRGDSPVGRGDSPVGRGDSPVGRGDSPVGRGDSPVGRGDSPVGRGDSPVGRGDSPVGRGDSPVGRGDSPVGRGDSPVGRGDSPVGRGDSPVGRGDSPVGRGDSPVGRGDSPVGRGDSPVGRGDSPVGRGDSPVGRGDSPVGRGDSPVGRGDSPVGRGDSPVGRGDSPVGRGDSPVGRGDSPVGRGDSPVGRGDSPVGRGDSPVGRGDSPVGRGDSPVGRGDSPVGRGDSPVGRGDSPVGRGDSPVGRGDSPVGRGDSPVGRGDSPVGRGDSPVGRGDSPVGRGDSPVGRGDSPVGRGDSPVGRGDSPVGRGDSPVGRGDSPVGRGDSPVGRGDSPVGRGDSPVGRGDSPVGRGDSPVGRGDSPVGRGDSPVGRGDSPVGRGDSPVGRGDSPVGRGDSPVGRGDSPVGRGDSPVGRGDSPVGRGDSPVGRGDSPVGRGDSPVGRGDSPVGRGDSPVGRGDSPVGRGDSPVGRGDSPVGRGDSPVGRGDSPVGRGDSPVGRGDSPVGRGDSPVGRGDSPVGRGDSPVGRGDSPVGRGDSPVGRGDSPVGRGDSPVGRGDSPVGRGDSPVGRGDSPVGRGDSPVGRGDSPVGRGDSPVGRGDSPVGRGDSPVGRGDSPVGRGDSPVGRGDSPVGRGDSPVGRGDSPVGRGDSPVGRGDSPVGRGDSPVGRGDSPVGRGDSPVGRGDSPVGRGDSPVGRGDSPVGRGDSPVGRGDSPVGRGDSPVGRGDSPVGRGDSPVGRGDSPVGRGDSPVGRGDSPVGRGDSPVGRGDSPVGRGDSPVGRGDSPVGRGDSPVGRGDSPVGRGDSPVGRGDSPVGRGDSPVGRGDSPVGRGDSPVGRGDSPVGRGDSPVGRGDSPVGRGDSPVGRGDSPVGRGDSPVGRGDSPVGRGDSPVGRGDSPVGRGDSPVGRGDSPVGRGDSPVGRGDSPVGRGDSPVGRGDSPVGRGDSPVGRGDSPVGRGDSPVGRGDSPVGRGDSPVGRGDSPVGRGDSPVGRGDSPVGRGDSPVGRGDSPVGRGDSPVGRGDSPVGRGDSPVGRGDSPVGRGDSPVGRGDSPVGRGDSPVGRGDSPVGRGDSPVGRGDSPVGRGDSPVGRGDSPVGRGDSPVGRGDSPVGRGDSPVGRGDSPVGRGDSPVGRGDSPVGRGDSPVGRGDSPVGRGDSPVGRGDSPVGRGDSPVGRGDSPVGRGDSPVGRGDSPVGRGDSPVGRGDSPVGRGDSPVGRGDSPVGRGDSPVGRGDSPVGRGDSPVGRGDSPVGRGDSPVGRGDSPVGRGDSPVGRGDSPVGRGDSPVGRGDSPVGRGDSPVGRGDSPVGRGDSPVGRGDSPVGRGDSPVGRGDSPVGRGDSPVGRGDSPVGRGDSPVGRGDSPVGRGDSPVGRGDSPVGRGDSPVGRGDSPVGRGDSPVGRGDSPVGRGDSPVGRGDSPVGRGDSPVGRGDSPVGRGDSPVGRGDSPVGRGDSPVGRGDSPVGRGDSPVGRGDSPVGRGDSPVGRGDSPVGRGDSPVGRGDSPVGRGDSPVGRGDSPVGRGDSPVGRGDSPVGRGDSPVGRGDSPVGRGDSPVGRGDSPVGRGDSPVGRGDSPVGRGDSPVGRGDSPVGRGDSPVGRGDSPVGRGDSPVGRGDSPVGRGDSPVGRGDSPVGRGDSPVGRGDSPVGRGDSPVGRGDSPVGRGDSPVGRGDSPVGRGDSPVGRGDSPVGRGDSPVGRGDSPVGRGDSPVGRGDSPVGRGDSPVGRGDSPVGRGDSPVGRGDSPVGRGDSPVGRGDSPVGRGDSPVGRGDSPVGRGDSPVGRGDSPVGRGDSPVGRGDSPVGRGDSPVGRGDSPVGRGDSPVGRGDSPVGRGDSPVGRGDSPVGRGDSPVGRGDSPVGRGDSPVGRGDSPVGRGDSPVGRGDSPVGRGDSPVGRGDSPVGRGDSPVGRGDSPVGRGDSPVGRGDSPVGRGDSPVGRGDSPVGRGDSPVGRGDSPVGRGDSPVGRGDSPVGRGDSPVGRGDSPVGRGDSPVGRGDSPVGRGDSPVGRGDSPVGRGDSPVGRGDSPVGRGDSPVGRGDSPVGRGDSPVGRGDSPVGRGDSPVGRGDSPVGRGDSPVGRGDSPVGRGDSPVGRGDSPVGRGDSPVGRGDSPVGRGDSPVGRGDSPVGRGDSPVGRGDSPVGRGDSPVGRGDSPVGRGDSPVGRGDSPVGRGDSPVGRGDSPVGRGDSPVGRGDSPVGRGDSPVGRGDSPVGRGDSPVGRGDSPVGRGDSPVGRGDSPVGRGDSPVGRGDSPVGRGDSPVGRGDSPVGRGDSPVGRGDSPVGRGDSPVGRGDSPVGRGDSPVGRGDSPVGRGDSPVGRGDSPVGRGDSPVGRGDSPVGRGDSPVGRGDSPVGRGDSPVGRGDSPVGRGDSPVGRGDSPVGRGDSPVGRGDSPVGRGDSPVGRGDSPVGRGDSPVGRGDSPVGRGDSPVGRGDSPVGRGDSPVGRGDSPVGRGDSPVGRGDSPVGRGDSPVGRGDSPVGRGDSPVGRGDSPVGRGDSPVGRGDSPVGRGDSPVGRGDSPVGRGDSPVGRGDSPVGRGDSPVGRGDSPVGRGDSPVGRGDSPVGRGDSPVGRGDSPVGRGDSPVGRGDSPVGRGDSPVGRGDSPVGRGDSPVGRGDSPVGRGDSPVGRGDSPVGRGDSPVGRGDSPVGRGDSPVGRGDSPVGRGDSPVGRGDSPV

SEQ ID NO: 4 - protein, 4000 aa, Artificial Sequence
  resilin-like polypeptide
  MISC_FEATURE (9)..(4000): May be present or absent in groups of the repeat unit Gly Arg Gly Asp Ser Pro Tyr Gly
GRGDSPYGGRGDSPYGGRGDSPYGGRGDSPYGGRGDSPYGGRGDSPYGGRGDSPYGGRGDSPYGGRGDSPYGGRGDSPYGGRGDSPYGGRGDSPYGGRGDSPYGGRGDSPYGGRGDSPYGGRGDSPYGGRGDSPYGGRGDSPYGGRGDSPYGGRGDSPYGGRGDSPYGGRGDSPYGGRGDSPYGGRGDSPYGGRGDSPYGGRGDSPYGGRGDSPYGGRGDSPYGGRGDSPYGGRGDSPYGGRGDSPYGGRGDSPYGGRGDSPYGGRGDSPYGGRGDSPYGGRGDSPYGGRGDSPYGGRGDSPYGGRGDSPYGGRGDSPYGGRGDSPYGGRGDSPYGGRGDSPYGGRGDSPYGGRGDSPYGGRGDSPYGGRGDSPYGGRGDSPYGGRGDSPYGGRGDSPYGGRGDSPYGGRGDSPYGGRGDSPYGGRGDSPYGGRGDSPYGGRGDSPYGGRGDSPYGGRGDSPYGGRGDSPYGGRGDSPYGGRGDSPYGGRGDSPYGGRGDSPYGGRGDSPYGGRGDSPYGGRGDSPYGGRGDSPYGGRGDSPYGGRGDSPYGGRGDSPYGGRGDSPYGGRGDSPYGGRGDSPYGGRGDSPYGGRGDSPYGGRGDSPYGGRGDSPYGGRGDSPYGGRGDSPYGGRGDSPYGGRGDSPYGGRGDSPYGGRGDSPYGGRGDSPYGGRGDSPYGGRGDSPYGGRGDSPYGGRGDSPYGGRGDSPYGGRGDSPYGGRGDSPYGGRGDSPYGGRGDSPYGGRGDSPYGGRGDSPYGGRGDSPYGGRGDSPYGGRGDSPYGGRGDSPYGGRGDSPYGGRGDSPYGGRGDSPYGGRGDSPYGGRGDSPYGGRGDSPYGGRGDSPYGGRGDSPYGGRGDSPYGGRGDSPYGGRGDSPYGGRGDSPYGGRGDSPYGGRGDSPYGGRGDSPYGGRGDSPYGGRGDSPYGGRGDSPYGGRGDSPYGGRGDSPYGGRGDSPYGGRGDSPYGGRGDSPYGGRGDSPYGGRGDSPYGGRGDSPYGGRGDSPYGGRGDSPYGGRGDSPYGGRGDSPYGGRGDSPYGGRGDSPYGGRGDSPYGGRGDSPYGGRGDSPYGGRGDSPYGGRGDSPYGGRGDSPYGGRGDSPYGGRGDSPYGGRGDSPYGGRGDSPYGGRGDSPYGGRGDSPYGGRGDSPYGGRGDSPYGGRGDSPYGGRGDSPYGGRGDSPYGGRGDSPYGGRGDSPYGGRGDSPYGGRGDSPYGGRGDSPYGGRGDSPYGGRGDSPYGGRGDSPYGGRGDSPYGGRGDSPYGGRGDSPYGGRGDSPYGGRGDSPYGGRGDSPYGGRGDSPYGGRGDSPYGGRGDSPYGGRGDSPYGGRGDSPYGGRGDSPYGGRGDSPYGGRGDSPYGGRGDSPYGGRGDSPYGGRGDSPYGGRGDSPYGGRGDSPYGGRGDSPYGGRGDSPYGGRGDSPYGGRGDSPYGGRGDSPYGGRGDSPYGGRGDSPYGGRGDSPYGGRGDSPYGGRGDSPYGGRGDSPYGGRGDSPYGGRGDSPYGGRGDSPYGGRGDSPYGGRGDSPYGGRGDSPYGGRGDSPYGGRGDSPYGGRGDSPYGGRGDSPYGGRGDSPYGGRGDSPYGGRGDSPYGGRGDSPYGGRGDSPYGGRGDSPYGGRGDSPYGGRGDSPYGGRGDSPYGGRGDSPYGGRGDSPYGGRGDSPYGGRGDSPYGGRGDSPYGGRGDSPYGGRGDSPYGGRGDSPYGGRGDSPYGGRGDSPYGGRGDSPYGGRGDSPYGGRGDSPYGGRGDSPYGGRGDSPYGGRGDSPYGGRGDSPYGGRGDSPYGGRGDSPYGGRGDSPYGGRGDSPYGGRGDSPYGGRGDSPYGGRGDSPYGGRGDSPYGGRGDSPYGGRGDSPYGGRGDSPYGGRGDSPYGGRGDSPYGGRGDSPYGGRGDSPYGGRGDSPYGGRGDSPYGGRGDSPYGGRGDSPYGGRGDSPYGGRGDSPYGGRGDSPYGGRGDSPYGGRGDSPYGGRGDSPYGGRGDSPYGGRGDSPYGGRGDSPYGGRGDSPYGGRGDSPYGGRGDSPYGGRGDSPYGGRGDSPYGGRGDSPYGGRGDSPYGGRGDSPYGGRGDSPYGGRGDSPYGGRGDSPYGGRGDSPYGGRGDSPYGGRGDSPYGGRGDSPYGGRGDSPYGGRGDSPYGGRGDSPYGGRGDSPYGGRGDSPYGGRGDSPYGGRGDSPYGGRGDSPYGGRGDSPYGGRGDSPYGGRGDSPYGGRGDSPYGGRGDSPYGGRGDSPYGGRGDSPYGGRGDSPYGGRGDSPYGGRGDSPYGGRGDSPYGGRGDSPYGGRGDSPYGGRGDSPYGGRGDSPYGGRGDSPYGGRGDSPYGGRGDSPYGGRGDSPYGGRGDSPYGGRGDSPYGGRGDSPYGGRGDSPYGGRGDSPYGGRGDSPYGGRGDSPYGGRGDSPYGGRGDSPYGGRGDSPYGGRGDSPYGGRGDSPYGGRGDSPYGGRGDSPYGGRGDSPYGGRGDSPYGGRGDSPYGGRGDSPYGGRGDSPYGGRGDSPYGGRGDSPYGGRGDSPYGGRGDSPYGGRGDSPYGGRGDSPYGGRGDSPYGGRGDSPYGGRGDSPYGGRGDSPYGGRGDSPYGGRGDSPYGGRGDSPYGGRGDSPYGGRGDSPYGGRGDSPYGGRGDSPYGGRGDSPYGGRGDSPYGGRGDSPYGGRGDSPYGGRGDSPYGGRGDSPYGGRGDSPYGGRGDSPYGGRGDSPYGGRGDSPYGGRGDSPYGGRGDSPYGGRGDSPYGGRGDSPYGGRGDSPYGGRGDSPYGGRGDSPYGGRGDSPYGGRGDSPYGGRGDSPYGGRGDSPYGGRGDSPYGGRGDSPYGGRGDSPYGGRGDSPYGGRGDSPYGGRGDSPYGGRGDSPYGGRGDSPYGGRGDSPYGGRGDSPYGGRGDSPYGGRGDSPYGGRGDSPYGGRGDSPYGGRGDSPYGGRGDSPYGGRGDSPYGGRGDSPYGGRGDSPYGGRGDSPYGGRGDSPYGGRGDSPYGGRGDSPYGGRGDSPYGGRGDSPYGGRGDSPYGGRGDSPYGGRGDSPYGGRGDSPYGGRGDSPYGGRGDSPYGGRGDSPYGGRGDSPYGGRGDSPYGGRGDSPYGGRGDSPYGGRGDSPYGGRGDSPYGGRGDSPYGGRGDSPYGGRGDSPYGGRGDSPYGGRGDSPYGGRGDSPYGGRGDSPYGGRGDSPYGGRGDSPYGGRGDSPYGGRGDSPYGGRGDSPYGGRGDSPYGGRGDSPYGGRGDSPYGGRGDSPYGGRGDSPYGGRGDSPYGGRGDSPYGGRGDSPYGGRGDSPYGGRGDSPYGGRGDSPYGGRGDSPYGGRGDSPYGGRGDSPYGGRGDSPYGGRGDSPYGGRGDSPYGGRGDSPYGGRGDSPYGGRGDSPYGGRGDSPYGGRGDSPYGGRGDSPYGGRGDSPYGGRGDSPYGGRGDSPYGGRGDSPYGGRGDSPYGGRGDSPYGGRGDSPYGGRGDSPYGGRGDSPYGGRGDSPYGGRGDSPYGGRGDSPYGGRGDSPYGGRGDSPYGGRGDSPYGGRGDSPYGGRGDSPYGGRGDSPYGGRGDSPYGGRGDSPYGGRGDSPYGGRGDSPYGGRGDSPYGGRGDSPYGGRGDSPYGGRGDSPYGGRGDSPYGGRGDSPYGGRGDSPYGGRGDSPYGGRGDSPYGGRGDSPYGGRGDSPYGGRGDSPYGGRGDSPYGGRGDSPYGGRGDSPYGGRGDSPYGGRGDSPYGGRGDSPYGGRGDSPYGGRGDSPYGGRGDSPYGGRGDSPYGGRGDSPYGGRGDSPYGGRGDSPYGGRGDSPYGGRGDSPYGGRGDSPYGGRGDSPYGGRGDSPYGGRGDSPYGGRGDSPYGGRGDSPYGGRGDSPYGGRGDSPYGGRGDSPYGGRGDSPYGGRGDSPYGGRGDSPYGGRGDSPYGGRGDSPYGGRGDSPYGGRGDSPYGGRGDSPYGGRGDSPYGGRGDSPYGGRGDSPYGGRGDSPYGGRGDSPYGGRGDSPYGGRGDSPYGGRGDSPYGGRGDSPYGGRGDSPYGGRGDSPYGGRGDSPYG

SEQ ID NO: 5 - protein, 3500 aa, Artificial Sequence
  resilin-like polypeptide
  MISC_FEATURE (8)..(3500): May be present or absent in groups of the repeat unit Arg Pro Leu Gly Tyr Asp Ser
RPLGYDSRPLGYDSRPLGYDSRPLGYDSRPLGYDSRPLGYDSRPLGYDSRPLGYDSRPLGYDSRPLGYDSRPLGYDSRPLGYDSRPLGYDSRPLGYDSRPLGYDSRPLGYDSRPLGYDSRPLGYDSRPLGYDSRPLGYDSRPLGYDSRPLGYDSRPLGYDSRPLGYDSRPLGYDSRPLGYDSRPLGYDSRPLGYDSRPLGYDSRPLGYDSRPLGYDSRPLGYDSRPLGYDSRPLGYDSRPLGYDSRPLGYDSRPLGYDSRPLGYDSRPLGYDSRPLGYDSRPLGYDSRPLGYDSRPLGYDSRPLGYDSRPLGYDSRPLGYDSRPLGYDSRPLGYDSRPLGYDSRPLGYDSRPLGYDSRPLGYDSRPLGYDSRPLGYDSRPLGYDSRPLGYDSRPLGYDSRPLGYDSRPLGYDSRPLGYDSRPLGYDSRPLGYDSRPLGYDSRPLGYDSRPLGYDSRPLGYDSRPLGYDSRPLGYDSRPLGYDSRPLGYDSRPLGYDSRPLGYDSRPLGYDSRPLGYDSRPLGYDSRPLGYDSRPLGYDSRPLGYDSRPLGYDSRPLGYDSRPLGYDSRPLGYDSRPLGYDSRPLGYDSRPLGYDSRPLGYDSRPLGYDSRPLGYDSRPLGYDSRPLGYDSRPLGYDSRPLGYDSRPLGYDSRPLGYDSRPLGYDSRPLGYDSRPLGYDSRPLGYDSRPLGYDSRPLGYDSRPLGYDSRPLGYDSRPLGYDSRPLGYDSRPLGYDSRPLGYDSRPLGYDSRPLGYDSRPLGYDSRPLGYDSRPLGYDSRPLGYDSRPLGYDSRPLGYDSRPLGYDSRPLGYDSRPLGYDSRPLGYDSRPLGYDSRPLGYDSRPLGYDSRPLGYDSRPLGYDSRPLGYDSRPLGYDSRPLGYDSRPLGYDSRPLGYDSRPLGYDSRPLGYDSRPLGYDSRPLGYDSRPLGYDSRPLGYDSRPLGYDSRPLGYDSRPLGYDSRPLGYDSRPLGYDSRPLGYDSRPLGYDSRPLGYDSRPLGYDSRPLGYDSRPLGYDSRPLGYDSRPLGYDSRPLGYDSRPLGYDSRPLGYDSRPLGYDSRPLGYDSRPLGYDSRPLGYDSRPLGYDSRPLGYDSRPLGYDSRPLGYDSRPLGYDSRPLGYDSRPLGYDSRPLGYDSRPLGYDSRPLGYDSRPLGYDSRPLGYDSRPLGYDSRPLGYDSRPLGYDSRPLGYDSRPLGYDSRPLGYDSRPLGYDSRPLGYDSRPLGYDSRPLGYDSRPLGYDSRPLGYDSRPLGYDSRPLGYDSRPLGYDSRPLGYDSRPLGYDSRPLGYDSRPLGYDSRPLGYDSRPLGYDSRPLGYDSRPLGYDSRPLGYDSRPLGYDSRPLGYDSRPLGYDSRPLGYDSRPLGYDSRPLGYDSRPLGYDSRPLGYDSRPLGYDSRPLGYDSRPLGYDSRPLGYDSRPLGYDSRPLGYDSRPLGYDSRPLGYDSRPLGYDSRPLGYDSRPLGYDSRPLGYDSRPLGYDSRPLGYDSRPLGYDSRPLGYDSRPLGYDSRPLGYDSRPLGYDSRPLGYDSRPLGYDSRPLGYDSRPLGYDSRPLGYDSRPLGYDSRPLGYDSRPLGYDSRPLGYDSRPLGYDSRPLGYDSRPLGYDSRPLGYDSRPLGYDSRPLGYDSRPLGYDSRPLGYDSRPLGYDSRPLGYDSRPLGYDSRPLGYDSRPLGYDSRPLGYDSRPLGYDSRPLGYDSRPLGYDSRPLGYDSRPLGYDSRPLGYDSRPLGYDSRPLGYDSRPLGYDSRPLGYDSRPLGYDSRPLGYDSRPLGYDSRPLGYDSRPLGYDSRPLGYDSRPLGYDSRPLGYDSRPLGYDSRPLGYDSRPLGYDSRPLGYDSRPLGYDSRPLGYDSRPLGYDSRPLGYDSRPLGYDSRPLGYDSRPLGYDSRPLGYDSRPLGYDSRPLGYDSRPLGYDSRPLGYDSRPLGYDSRPLGYDSRPLGYDSRPLGYDSRPLGYDSRPLGYDSRPLGYDSRPLGYDSRPLGYDSRPLGYDSRPLGYDSRPLGYDSRPLGYDSRPLGYDSRPLGYDSRPLGYDSRPLGYDSRPLGYDSRPLGYDSRPLGYDSRPLGYDSRPLGYDSRPLGYDSRPLGYDSRPLGYDSRPLGYDSRPLGYDSRPLGYDSRPLGYDSRPLGYDSRPLGYDSRPLGYDSRPLGYDSRPLGYDSRPLGYDSRPLGYDSRPLGYDSRPLGYDSRPLGYDSRPLGYDSRPLGYDSRPLGYDSRPLGYDSRPLGYDSRPLGYDSRPLGYDSRPLGYDSRPLGYDSRPLGYDSRPLGYDSRPLGYDSRPLGYDSRPLGYDSRPLGYDSRPLGYDSRPLGYDSRPLGYDSRPLGYDSRPLGYDSRPLGYDSRPLGYDSRPLGYDSRPLGYDSRPLGYDSRPLGYDSRPLGYDSRPLGYDSRPLGYDSRPLGYDSRPLGYDSRPLGYDSRPLGYDSRPLGYDSRPLGYDSRPLGYDSRPLGYDSRPLGYDSRPLGYDSRPLGYDSRPLGYDSRPLGYDSRPLGYDSRPLGYDSRPLGYDSRPLGYDSRPLGYDSRPLGYDSRPLGYDSRPLGYDSRPLGYDSRPLGYDSRPLGYDSRPLGYDSRPLGYDSRPLGYDSRPLGYDSRPLGYDSRPLGYDSRPLGYDSRPLGYDSRPLGYDSRPLGYDSRPLGYDSRPLGYDSRPLGYDSRPLGYDSRPLGYDSRPLGYDSRPLGYDSRPLGYDSRPLGYDSRPLGYDSRPLGYDSRPLGYDSRPLGYDSRPLGYDSRPLGYDSRPLGYDSRPLGYDSRPLGYDSRPLGYDSRPLGYDSRPLGYDSRPLGYDSRPLGYDSRPLGYDSRPLGYDSRPLGYDSRPLGYDSRPLGYDSRPLGYDSRPLGYDSRPLGYDSRPLGYDSRPLGYDSRPLGYDSRPLGYDSRPLGYDSRPLGYDSRPLGYDSRPLGYDSRPLGYDSRPLGYDSRPLGYDSRPLGYDSRPLGYDSRPLGYDSRPLGYDSRPLGYDSRPLGYDSRPLGYDSRPLGYDSRPLGYDSRPLGYDSRPLGYDSRPLGYDSRPLGYDSRPLGYDSRPLGYDSRPLGYDSRPLGYDSRPLGYDSRPLGYDSRPLGYDSRPLGYDSRPLGYDSRPLGYDSRPLGYDSRPLGYDSRPLGYDSRPLGYDSRPLGYDSRPLGYDSRPLGYDSRPLGYDSRPLGYDSRPLGYDSRPLGYDSRPLGYDSRPLGYDSRPLGYDSRPLGYDSRPLGYDSRPLGYDSRPLGYDSRPLGYDSRPLGYDSRPLGYDSRPLGYDSRPLGYDSRPLGYDSRPLGYDSRPLGYDSRPLGYDSRPLGYDSRPLGYDSRPLGYDSRPLGYDSRPLGYDSRPLGYDSRPLGYDSRPLGYDSRPLGYDSRPLGYDSRPLGYDSRPLGYDSRPLGYDSRPLGYDSRPLGYDSRPLGYDSRPLGYDSRPLGYDSRPLGYDSRPLGYDSRPLGYDSRPLGYDSRPLGYDSRPLGYDSRPLGYDSRPLGYDSRPLGYDSRPLGYDSRPLGYDSRPLGYDSRPLGYDSRPLGYDS

SEQ ID NO: 6 - protein, 3500 aa, Artificial Sequence
  resilin-like polypeptide
  MISC_FEATURE (8)..(3500): May be present or absent in groups of the repeat unit Arg Pro Ala Gly Tyr Asp Ser
RPAGYDSRPAGYDSRPAGYDSRPAGYDSRPAGYDSRPAGYDSRPAGYDSRPAGYDSRPAGYDSRPAGYDSRPAGYDSRPAGYDSRPAGYDSRPAGYDSRPAGYDSRPAGYDSRPAGYDSRPAGYDSRPAGYDSRPAGYDSRPAGYDSRPAGYDSRPAGYDSRPAGYDSRPAGYDSRPAGYDSRPAGYDSRPAGYDSRPAGYDSRPAGYDSRPAGYDSRPAGYDSRPAGYDSRPAGYDSRPAGYDSRPAGYDSRPAGYDSRPAGYDSRPAGYDSRPAGYDSRPAGYDSRPAGYDSRPAGYDSRPAGYDSRPAGYDSRPAGYDSRPAGYDSRPAGYDSRPAGYDSRPAGYDSRPAGYDSRPAGYDSRPAGYDSRPAGYDSRPAGYDSRPAGYDSRPAGYDSRPAGYDSRPAGYDSRPAGYDSRPAGYDSRPAGYDSRPAGYDSRPAGYDSRPAGYDSRPAGYDSRPAGYDSRPAGYDSRPAGYDSRPAGYDSRPAGYDSRPAGYDSRPAGYDSRPAGYDSRPAGYDSRPAGYDSRPAGYDSRPAGYDSRPAGYDSRPAGYDSRPAGYDSRPAGYDSRPAGYDSRPAGYDSRPAGYDSRPAGYDSRPAGYDSRPAGYDSRPAGYDSRPAGYDSRPAGYDSRPAGYDSRPAGYDSRPAGYDSRPAGYDSRPAGYDSRPAGYDSRPAGYDSRPAGYDSRPAGYDSRPAGYDSRPAGYDSRPAGYDSRPAGYDSRPAGYDSRPAGYDSRPAGYDSRPAGYDSRPAGYDSRPAGYDSRPAGYDSRPAGYDSRPAGYDSRPAGYDSRPAGYDSRPAGYDSRPAGYDSRPAGYDSRPAGYDSRPAGYDSRPAGYDSRPAGYDSRPAGYDSRPAGYDSRPAGYDSRPAGYDSRPAGYDSRPAGYDSRPAGYDSRPAGYDSRPAGYDSRPAGYDSRPAGYDSRPAGYDSRPAGYDSRPAGYDSRPAGYDSRPAGYDSRPAGYDSRPAGYDSRPAGYDSRPAGYDSRPAGYDSRPAGYDSRPAGYDSRPAGYDSRPAGYDSRPAGYDSRPAGYDSRPAGYDSRPAGYDSRPAGYDSRPAGYDSRPAGYDSRPAGYDSRPAGYDSRPAGYDSRPAGYDSRPAGYDSRPAGYDSRPAGYDSRPAGYDSRPAGYDSRPAGYDSRPAGYDSRPAGYDSRPAGYDSRPAGYDSRPAGYDSRPAGYDSRPAGYDSRPAGYDSRPAGYDSRPAGYDSRPAGYDSRPAGYDSRPAGYDSRPAGYDSRPAGYDSRPAGYDSRPAGYDSRPAGYDSRPAGYDSRPAGYDSRPAGYDSRPAGYDSRPAGYDSRPAGYDSRPAGYDSRPAGYDSRPAGYDSRPAGYDSRPAGYDSRPAGYDSRPAGYDSRPAGYDSRPAGYDSRPAGYDSRPAGYDSRPAGYDSRPAGYDSRPAGYDSRPAGYDSRPAGYDSRPAGYDSRPAGYDSRPAGYDSRPAGYDSRPAGYDSRPAGYDSRPAGYDSRPAGYDSRPAGYDSRPAGYDSRPAGYDSRPAGYDSRPAGYDSRPAGYDSRPAGYDSRPAGYDSRPAGYDSRPAGYDSRPAGYDSRPAGYDSRPAGYDSRPAGYDSRPAGYDSRPAGYDSRPAGYDSRPAGYDSRPAGYDSRPAGYDSRPAGYDSRPAGYDSRPAGYDSRPAGYDSRPAGYDSRPAGYDSRPAGYDSRPAGYDSRPAGYDSRPAGYDSRPAGYDSRPAGYDSRPAGYDSRPAGYDSRPAGYDSRPAGYDSRPAGYDSRPAGYDSRPAGYDSRPAGYDSRPAGYDSRPAGYDSRPAGYDSRPAGYDSRPAGYDSRPAGYDSRPAGYDSRPAGYDSRPAGYDSRPAGYDSRPAGYDSRPAGYDSRPAGYDSRPAGYDSRPAGYDSRPAGYDSRPAGYDSRPAGYDSRPAGYDSRPAGYDSRPAGYDSRPAGYDSRPAGYDSRPAGYDSRPAGYDSRPAGYDSRPAGYDSRPAGYDSRPAGYDSRPAGYDSRPAGYDSRPAGYDSRPAGYDSRPAGYDSRPAGYDSRPAGYDSRPAGYDSRPAGYDSRPAGYDSRPAGYDSRPAGYDSRPAGYDSRPAGYDSRPAGYDSRPAGYDSRPAGYDSRPAGYDSRPAGYDSRPAGYDSRPAGYDSRPAGYDSRPAGYDSRPAGYDSRPAGYDSRPAGYDSRPAGYDSRPAGYDSRPAGYDSRPAGYDSRPAGYDSRPAGYDSRPAGYDSRPAGYDSRPAGYDSRPAGYDSRPAGYDSRPAGYDSRPAGYDSRPAGYDSRPAGYDSRPAGYDSRPAGYDSRPAGYDSRPAGYDSRPAGYDSRPAGYDSRPAGYDSRPAGYDSRPAGYDSRPAGYDSRPAGYDSRPAGYDSRPAGYDSRPAGYDSRPAGYDSRPAGYDSRPAGYDSRPAGYDSRPAGYDSRPAGYDSRPAGYDSRPAGYDSRPAGYDSRPAGYDSRPAGYDSRPAGYDSRPAGYDSRPAGYDSRPAGYDSRPAGYDSRPAGYDSRPAGYDSRPAGYDSRPAGYDSRPAGYDSRPAGYDSRPAGYDSRPAGYDSRPAGYDSRPAGYDSRPAGYDSRPAGYDSRPAGYDSRPAGYDSRPAGYDSRPAGYDSRPAGYDSRPAGYDSRPAGYDSRPAGYDSRPAGYDSRPAGYDSRPAGYDSRPAGYDSRPAGYDSRPAGYDSRPAGYDSRPAGYDSRPAGYDSRPAGYDSRPAGYDSRPAGYDSRPAGYDSRPAGYDSRPAGYDSRPAGYDSRPAGYDSRPAGYDSRPAGYDSRPAGYDSRPAGYDSRPAGYDSRPAGYDSRPAGYDSRPAGYDSRPAGYDSRPAGYDSRPAGYDSRPAGYDSRPAGYDSRPAGYDSRPAGYDSRPAGYDSRPAGYDSRPAGYDSRPAGYDSRPAGYDSRPAGYDSRPAGYDSRPAGYDSRPAGYDSRPAGYDSRPAGYDSRPAGYDSRPAGYDSRPAGYDSRPAGYDSRPAGYDSRPAGYDSRPAGYDSRPAGYDSRPAGYDSRPAGYDSRPAGYDSRPAGYDSRPAGYDSRPAGYDSRPAGYDSRPAGYDSRPAGYDSRPAGYDSRPAGYDSRPAGYDSRPAGYDSRPAGYDSRPAGYDSRPAGYDSRPAGYDSRPAGYDSRPAGYDSRPAGYDSRPAGYDSRPAGYDSRPAGYDSRPAGYDSRPAGYDSRPAGYDSRPAGYDSRPAGYDSRPAGYDSRPAGYDSRPAGYDSRPAGYDSRPAGYDSRPAGYDSRPAGYDSRPAGYDSRPAGYDSRPAGYDSRPAGYDSRPAGYDSRPAGYDSRPAGYDSRPAGYDSRPAGYDSRPAGYDSRPAGYDSRPAGYDSRPAGYDSRPAGYDSRPAGYDSRPAGYDSRPAGYDSRPAGYDSRPAGYDSRPAGYDSRPAGYDSRPAGYDSRPAGYDSRPAGYDSRPAGYDSRPAGYDSRPAGYDSRPAGYDSRPAGYDSRPAGYDSRPAGYDSRPAGYDSRPAGYDSRPAGYDSRPAGYDSRPAGYDSRPAGYDSRPAGYDSRPAGYDSRPAGYDSRPAGYDSRPAGYDS

SEQ ID NO: 7 - protein, 3500 aa, Artificial Sequence
  resilin-like polypeptide
  MISC_FEATURE (8)..(3500): May be present or absent in groups of the repeat unit Gly Arg Gly Asp Ser Tyr Pro
GRGDSYPGRGDSYPGRGDSYPGRGDSYPGRGDSYPGRGDSYPGRGDSYPGRGDSYPGRGDSYPGRGDSYPGRGDSYPGRGDSYPGRGDSYPGRGDSYPGRGDSYPGRGDSYPGRGDSYPGRGDSYPGRGDSYPGRGDSYPGRGDSYPGRGDSYPGRGDSYPGRGDSYPGRGDSYPGRGDSYPGRGDSYPGRGDSYPGRGDSYPGRGDSYPGRGDSYPGRGDSYPGRGDSYPGRGDSYPGRGDSYPGRGDSYPGRGDSYPGRGDSYPGRGDSYPGRGDSYPGRGDSYPGRGDSYPGRGDSYPGRGDSYPGRGDSYPGRGDSYPGRGDSYPGRGDSYPGRGDSYPGRGDSYPGRGDSYPGRGDSYPGRGDSYPGRGDSYPGRGDSYPGRGDSYPGRGDSYPGRGDSYPGRGDSYPGRGDSYPGRGDSYPGRGDSYPGRGDSYPGRGDSYPGRGDSYPGRGDSYPGRGDSYPGRGDSYPGRGDSYPGRGDSYPGRGDSYPGRGDSYPGRGDSYPGRGDSYPGRGDSYPGRGDSYPGRGDSYPGRGDSYPGRGDSYPGRGDSYPGRGDSYPGRGDSYPGRGDSYPGRGDSYPGRGDSYPGRGDSYPGRGDSYPGRGDSYPGRGDSYPGRGDSYPGRGDSYPGRGDSYPGRGDSYPGRGDSYPGRGDSYPGRGDSYPGRGDSYPGRGDSYPGRGDSYPGRGDSYPGRGDSYPGRGDSYPGRGDSYPGRGDSYPGRGDSYPGRGDSYPGRGDSYPGRGDSYPGRGDSYPGRGDSYPGRGDSYPGRGDSYPGRGDSYPGRGDSYPGRGDSYPGRGDSYPGRGDSYPGRGDSYPGRGDSYPGRGDSYPGRGDSYPGRGDSYPGRGDSYPGRGDSYPGRGDSYPGRGDSYPGRGDSYPGRGDSYPGRGDSYPGRGDSYPGRGDSYPGRGDSYPGRGDSYPGRGDSYPGRGDSYPGRGDSYPGRGDSYPGRGDSYPGRGDSYPGRGDSYPGRGDSYPGRGDSYPGRGDSYPGRGDSYPGRGDSYPGRGDSYPGRGDSYPGRGDSYPGRGDSYPGRGDSYPGRGDSYPGRGDSYPGRGDSYPGRGDSYPGRGDSYPGRGDSYPGRGDSYPGRGDSYPGRGDSYPGRGDSYPGRGDSYPGRGDSYPGRGDSYPGRGDSYPGRGDSYPGRGDSYPGRGDSYPGRGDSYPGRGDSYPGRGDSYPGRGDSYPGRGDSYPGRGDSYPGRGDSYPGRGDSYPGRGDSYPGRGDSYPGRGDSYPGRGDSYPGRGDSYPGRGDSYPGRGDSYPGRGDSYPGRGDSYPGRGDSYPGRGDSYPGRGDSYPGRGDSYPGRGDSYPGRGDSYPGRGDSYPGRGDSYPGRGDSYPGRGDSYPGRGDSYPGRGDSYPGRGDSYPGRGDSYPGRGDSYPGRGDSYPGRGDSYPGRGDSYPGRGDSYPGRGDSYPGRGDSYPGRGDSYPGRGDSYPGRGDSYPGRGDSYPGRGDSYPGRGDSYPGRGDSYPGRGDSYPGRGDSYPGRGDSYPGRGDSYPGRGDSYPGRGDSYPGRGDSYPGRGDSYPGRGDSYPGRGDSYPGRGDSYPGRGDSYPGRGDSYPGRGDSYPGRGDSYPGRGDSYPGRGDSYPGRGDSYPGRGDSYPGRGDSYPGRGDSYPGRGDSYPGRGDSYPGRGDSYPGRGDSYPGRGDSYPGRGDSYPGRGDSYPGRGDSYPGRGDSYPGRGDSYPGRGDSYPGRGDSYPGRGDSYPGRGDSYPGRGDSYPGRGDSYPGRGDSYPGRGDSYPGRGDSYPGRGDSYPGRGDSYPGRGDSYPGRGDSYPGRGDSYPGRGDSYPGRGDSYPGRGDSYPGRGDSYPGRGDSYPGRGDSYPGRGDSYPGRGDSYPGRGDSYPGRGDSYPGRGDSYPGRGDSYPGRGDSYPGRGDSYPGRGDSYPGRGDSYPGRGDSYPGRGDSYPGRGDSYPGRGDSYPGRGDSYPGRGDSYPGRGDSYPGRGDSYPGRGDSYPGRGDSYPGRGDSYPGRGDSYPGRGDSYPGRGDSYPGRGDSYPGRGDSYPGRGDSYPGRGDSYPGRGDSYPGRGDSYPGRGDSYPGRGDSYPGRGDSYPGRGDSYPGRGDSYPGRGDSYPGRGDSYPGRGDSYPGRGDSYPGRGDSYPGRGDSYPGRGDSYPGRGDSYPGRGDSYPGRGDSYPGRGDSYPGRGDSYPGRGDSYPGRGDSYPGRGDSYPGRGDSYPGRGDSYPGRGDSYPGRGDSYPGRGDSYPGRGDSYPGRGDSYPGRGDSYPGRGDSYPGRGDSYPGRGDSYPGRGDSYPGRGDSYPGRGDSYPGRGDSYPGRGDSYPGRGDSYPGRGDSYPGRGDSYPGRGDSYPGRGDSYPGRGDSYPGRGDSYPGRGDSYPGRGDSYPGRGDSYPGRGDSYPGRGDSYPGRGDSYPGRGDSYPGRGDSYPGRGDSYPGRGDSYPGRGDSYPGRGDSYPGRGDSYPGRGDSYPGRGDSYPGRGDSYPGRGDSYPGRGDSYPGRGDSYPGRGDSYPGRGDSYPGRGDSYPGRGDSYPGRGDSYPGRGDSYPGRGDSYPGRGDSYPGRGDSYPGRGDSYPGRGDSYPGRGDSYPGRGDSYPGRGDSYPGRGDSYPGRGDSYPGRGDSYPGRGDSYPGRGDSYPGRGDSYPGRGDSYPGRGDSYPGRGDSYPGRGDSYPGRGDSYPGRGDSYPGRGDSYPGRGDSYPGRGDSYPGRGDSYPGRGDSYPGRGDSYPGRGDSYPGRGDSYPGRGDSYPGRGDSYPGRGDSYPGRGDSYPGRGDSYPGRGDSYPGRGDSYPGRGDSYPGRGDSYPGRGDSYPGRGDSYPGRGDSYPGRGDSYPGRGDSYPGRGDSYPGRGDSYPGRGDSYPGRGDSYPGRGDSYPGRGDSYPGRGDSYPGRGDSYPGRGDSYPGRGDSYPGRGDSYPGRGDSYPGRGDSYPGRGDSYPGRGDSYPGRGDSYPGRGDSYPGRGDSYPGRGDSYPGRGDSYPGRGDSYPGRGDSYPGRGDSYPGRGDSYPGRGDSYPGRGDSYPGRGDSYPGRGDSYPGRGDSYPGRGDSYPGRGDSYPGRGDSYPGRGDSYPGRGDSYPGRGDSYPGRGDSYPGRGDSYPGRGDSYPGRGDSYPGRGDSYPGRGDSYPGRGDSYPGRGDSYPGRGDSYPGRGDSYPGRGDSYPGRGDSYPGRGDSYPGRGDSYPGRGDSYPGRGDSYPGRGDSYPGRGDSYPGRGDSYPGRGDSYPGRGDSYPGRGDSYPGRGDSYPGRGDSYPGRGDSYPGRGDSYPGRGDSYPGRGDSYPGRGDSYPGRGDSYPGRGDSYPGRGDSYPGRGDSYPGRGDSYPGRGDSYPGRGDSYPGRGDSYPGRGDSYPGRGDSYPGRGDSYPGRGDSYPGRGDSYPGRGDSYPGRGDSYPGRGDSYPGRGDSYPGRGDSYPGRGDSYPGRGDSYPGRGDSYPGRGDSYPGRGDSYPGRGDSYPGRGDSYPGRGDSYPGRGDSYPGRGDSYPGRGDSYPGRGDSYPGRGDSYPGRGDSYPGRGDSYP

SEQ ID NO: 8 - protein, 4000 aa, Artificial Sequence
  resilin-like polypeptide
  MISC_FEATURE (9)..(4000): May be present or absent in groups of the repeat unit Gly Arg Gly Asp Ser Pro Tyr Gln
GRGDSPYQGRGDSPYQGRGDSPYQGRGDSPYQGRGDSPYQGRGDSPYQGRGDSPYQGRGDSPYQGRGDSPYQGRGDSPYQGRGDSPYQGRGDSPYQGRGDSPYQGRGDSPYQGRGDSPYQGRGDSPYQGRGDSPYQGRGDSPYQGRGDSPYQGRGDSPYQGRGDSPYQGRGDSPYQGRGDSPYQGRGDSPYQGRGDSPYQGRGDSPYQGRGDSPYQGRGDSPYQGRGDSPYQGRGDSPYQGRGDSPYQGRGDSPYQGRGDSPYQGRGDSPYQGRGDSPYQGRGDSPYQGRGDSPYQGRGDSPYQGRGDSPYQGRGDSPYQGRGDSPYQGRGDSPYQGRGDSPYQGRGDSPYQGRGDSPYQGRGDSPYQGRGDSPYQGRGDSPYQGRGDSPYQGRGDSPYQGRGDSPYQGRGDSPYQGRGDSPYQGRGDSPYQGRGDSPYQGRGDSPYQGRGDSPYQGRGDSPYQGRGDSPYQGRGDSPYQGRGDSPYQGRGDSPYQGRGDSPYQGRGDSPYQGRGDSPYQGRGDSPYQGRGDSPYQGRGDSPYQGRGDSPYQGRGDSPYQGRGDSPYQGRGDSPYQGRGDSPYQGRGDSPYQGRGDSPYQGRGDSPYQGRGDSPYQGRGDSPYQGRGDSPYQGRGDSPYQGRGDSPYQGRGDSPYQGRGDSPYQGRGDSPYQGRGDSPYQGRGDSPYQGRGDSPYQGRGDSPYQGRGDSPYQGRGDSPYQGRGDSPYQGRGDSPYQGRGDSPYQGRGDSPYQGRGDSPYQGRGDSPYQGRGDSPYQGRGDSPYQGRGDSPYQGRGDSPYQGRGDSPYQGRGDSPYQGRGDSPYQGRGDSPYQGRGDSPYQGRGDSPYQGRGDSPYQGRGDSPYQGRGDSPYQGRGDSPYQGRGDSPYQGRGDSPYQGRGDSPYQGRGDSPYQGRGDSPYQGRGDSPYQGRGDSPYQGRGDSPYQGRGDSPYQGRGDSPYQGRGDSPYQGRGDSPYQGRGDSPYQGRGDSPYQGRGDSPYQGRGDSPYQGRGDSPYQGRGDSPYQGRGDSPYQGRGDSPYQGRGDSPYQGRGDSPYQGRGDSPYQGRGDSPYQGRGDSPYQGRGDSPYQGRGDSPYQGRGDSPYQGRGDSPYQGRGDSPYQGRGDSPYQGRGDSPYQGRGDSPYQGRGDSPYQGRGDSPYQGRGDSPYQGRGDSPYQGRGDSPYQGRGDSPYQGRGDSPYQGRGDSPYQGRGDSPYQGRGDSPYQGRGDSPYQGRGDSPYQGRGDSPYQGRGDSPYQGRGDSPYQGRGDSPYQGRGDSPYQGRGDSPYQGRGDSPYQGRGDSPYQGRGDSPYQGRGDSPYQGRGDSPYQGRGDSPYQGRGDSPYQGRGDSPYQGRGDSPYQGRGDSPYQGRGDSPYQGRGDSPYQGRGDSPYQGRGDSPYQGRGDSPYQGRGDSPYQGRGDSPYQGRGDSPYQGRGDSPYQGRGDSPYQGRGDSPYQGRGDSPYQGRGDSPYQGRGDSPYQGRGDSPYQGRGDSPYQGRGDSPYQGRGDSPYQGRGDSPYQGRGDSPYQGRGDSPYQGRGDSPYQGRGDSPYQGRGDSPYQGRGDSPYQGRGDSPYQGRGDSPYQGRGDSPYQGRGDSPYQGRGDSPYQGRGDSPYQGRGDSPYQGRGDSPYQGRGDSPYQGRGDSPYQGRGDSPYQGRGDSPYQGRGDSPYQGRGDSPYQGRGDSPYQGRGDSPYQGRGDSPYQGRGDSPYQGRGDSPYQGRGDSPYQGRGDSPYQGRGDSPYQGRGDSPYQGRGDSPYQGRGDSPYQGRGDSPYQGRGDSPYQGRGDSPYQGRGDSPYQGRGDSPYQGRGDSPYQGRGDSPYQGRGDSPYQGRGDSPYQGRGDSPYQGRGDSPYQGRGDSPYQGRGDSPYQGRGDSPYQGRGDSPYQGRGDSPYQGRGDSPYQGRGDSPYQGRGDSPYQGRGDSPYQGRGDSPYQGRGDSPYQGRGDSPYQGRGDSPYQGRGDSPYQGRGDSPYQGRGDSPYQGRGDSPYQGRGDSPYQGRGDSPYQGRGDSPYQGRGDSPYQGRGDSPYQGRGDSPYQGRGDSPYQGRGDSPYQGRGDSPYQGRGDSPYQGRGDSPYQGRGDSPYQGRGDSPYQGRGDSPYQGRGDSPYQGRGDSPYQGRGDSPYQGRGDSPYQGRGDSPYQGRGDSPYQGRGDSPYQGRGDSPYQGRGDSPYQGRGDSPYQGRGDSPYQGRGDSPYQGRGDSPYQGRGDSPYQGRGDSPYQGRGDSPYQGRGDSPYQGRGDSPYQGRGDSPYQGRGDSPYQGRGDSPYQGRGDSPYQGRGDSPYQGRGDSPYQGRGDSPYQGRGDSPYQGRGDSPYQGRGDSPYQGRGDSPYQGRGDSPYQGRGDSPYQGRGDSPYQGRGDSPYQGRGDSPYQGRGDSPYQGRGDSPYQGRGDSPYQGRGDSPYQGRGDSPYQGRGDSPYQGRGDSPYQGRGDSPYQGRGDSPYQGRGDSPYQGRGDSPYQGRGDSPYQGRGDSPYQGRGDSPYQGRGDSPYQGRGDSPYQGRGDSPYQGRGDSPYQGRGDSPYQGRGDSPYQGRGDSPYQGRGDSPYQGRGDSPYQGRGDSPYQGRGDSPYQGRGDSPYQGRGDSPYQGRGDSPYQGRGDSPYQGRGDSPYQGRGDSPYQGRGDSPYQGRGDSPYQGRGDSPYQGRGDSPYQGRGDSPYQGRGDSPYQGRGDSPYQGRGDSPYQGRGDSPYQGRGDSPYQGRGDSPYQGRGDSPYQGRGDSPYQGRGDSPYQGRGDSPYQGRGDSPYQGRGDSPYQGRGDSPYQGRGDSPYQGRGDSPYQGRGDSPYQGRGDSPYQGRGDSPYQGRGDSPYQGRGDSPYQGRGDSPYQGRGDSPYQGRGDSPYQGRGDSPYQGRGDSPYQGRGDSPYQGRGDSPYQGRGDSPYQGRGDSPYQGRGDSPYQGRGDSPYQGRGDSPYQGRGDSPYQGRGDSPYQGRGDSPYQGRGDSPYQGRGDSPYQGRGDSPYQGRGDSPYQGRGDSPYQGRGDSPYQGRGDSPYQGRGDSPYQGRGDSPYQGRGDSPYQGRGDSPYQGRGDSPYQGRGDSPYQGRGDSPYQGRGDSPYQGRGDSPYQGRGDSPYQGRGDSPYQGRGDSPYQGRGDSPYQGRGDSPYQGRGDSPYQGRGDSPYQGRGDSPYQGRGDSPYQGRGDSPYQGRGDSPYQGRGDSPYQGRGDSPYQGRGDSPYQGRGDSPYQGRGDSPYQGRGDSPYQGRGDSPYQGRGDSPYQGRGDSPYQGRGDSPYQGRGDSPYQGRGDSPYQGRGDSPYQGRGDSPYQGRGDSPYQGRGDSPYQGRGDSPYQGRGDSPYQGRGDSPYQGRGDSPYQGRGDSPYQGRGDSPYQGRGDSPYQGRGDSPYQGRGDSPYQGRGDSPYQGRGDSPYQGRGDSPYQGRGDSPYQGRGDSPYQGRGDSPYQGRGDSPYQGRGDSPYQGRGDSPYQGRGDSPYQGRGDSPYQGRGDSPYQGRGDSPYQGRGDSPYQGRGDSPYQGRGDSPYQGRGDSPYQGRGDSPYQGRGDSPYQGRGDSPYQGRGDSPYQGRGDSPYQGRGDSPYQGRGDSPYQGRGDSPYQGRGDSPYQGRGDSPYQGRGDSPYQGRGDSPYQGRGDSPYQGRGDSPYQGRGDSPYQGRGDSPYQGRGDSPYQGRGDSPYQGRGDSPYQGRGDSPYQGRGDSPYQGRGDSPYQGRGDSPYQGRGDSPYQGRGDSPYQGRGDSPYQGRGDSPYQGRGDSPYQGRGDSPYQGRGDSPYQGRGDSPYQGRGDSPYQGRGDSPYQGRGDSPYQGRGDSPYQGRGDSPYQGRGDSPYQGRGDSPYQGRGDSPYQGRGDSPYQGRGDSPYQGRGDSPYQGRGDSPYQGRGDSPYQGRGDSPYQGRGDSPYQGRGDSPYQGRGDSPYQGRGDSPYQGRGDSPYQGRGDSPYQGRGDSPYQGRGDSPYQGRGDSPYQGRGDSPYQGRGDSPYQGRGDSPYQGRGDSPYQGRGDSPYQGRGDSPYQGRGDSPYQGRGDSPYQGRGDSPYQ

SEQ ID NO: 9 - protein, 4000 aa, Artificial Sequence
  resilin-like polypeptide
  MISC_FEATURE (9)..(4000): May be present or absent in groups of the repeat unit Gly Arg Gly Asn Ser Pro Tyr Gly
GRGNSPYGGRGNSPYGGRGNSPYGGRGNSPYGGRGNSPYGGRGNSPYGGRGNSPYGGRGNSPYGGRGNSPYGGRGNSPYGGRGNSPYGGRGNSPYGGRGNSPYGGRGNSPYGGRGNSPYGGRGNSPYGGRGNSPYGGRGNSPYGGRGNSPYGGRGNSPYGGRGNSPYGGRGNSPYGGRGNSPYGGRGNSPYGGRGNSPYGGRGNSPYGGRGNSPYGGRGNSPYGGRGNSPYGGRGNSPYGGRGNSPYGGRGNSPYGGRGNSPYGGRGNSPYGGRGNSPYGGRGNSPYGGRGNSPYGGRGNSPYGGRGNSPYGGRGNSPYGGRGNSPYGGRGNSPYGGRGNSPYGGRGNSPYGGRGNSPYGGRGNSPYGGRGNSPYGGRGNSPYGGRGNSPYGGRGNSPYGGRGNSPYGGRGNSPYGGRGNSPYGGRGNSPYGGRGNSPYGGRGNSPYGGRGNSPYGGRGNSPYGGRGNSPYGGRGNSPYGGRGNSPYGGRGNSPYGGRGNSPYGGRGNSPYGGRGNSPYGGRGNSPYGGRGNSPYGGRGNSPYGGRGNSPYGGRGNSPYGGRGNSPYGGRGNSPYGGRGNSPYGGRGNSPYGGRGNSPYGGRGNSPYGGRGNSPYGGRGNSPYGGRGNSPYGGRGNSPYGGRGNSPYGGRGNSPYGGRGNSPYGGRGNSPYGGRGNSPYGGRGNSPYGGRGNSPYGGRGNSPYGGRGNSPYGGRGNSPYGGRGNSPYGGRGNSPYGGRGNSPYGGRGNSPYGGRGNSPYGGRGNSPYGGRGNSPYGGRGNSPYGGRGNSPYGGRGNSPYGGRGNSPYGGRGNSPYGGRGNSPYGGRGNSPYGGRGNSPYGGRGNSPYGGRGNSPYGGRGNSPYGGRGNSPYGGRGNSPYGGRGNSPYGGRGNSPYGGRGNSPYGGRGNSPYGGRGNSPYGGRGNSPYGGRGNSPYGGRGNSPYGGRGNSPYGGRGNSPYGGRGNSPYGGRGNSPYGGRGNSPYGGRGNSPYGGRGNSPYGGRGNSPYGGRGNSPYGGRGNSPYGGRGNSPYGGRGNSPYGGRGNSPYGGRGNSPYGGRGNSPYGGRGNSPYGGRGNSPYGGRGNSPYGGRGNSPYGGRGNSPYGGRGNSPYGGRGNSPYGGRGNSPYGGRGNSPYGGRGNSPYGGRGNSPYGGRGNSPYGGRGNSPYGGRGNSPYGGRGNSPYGGRGNSPYGGRGNSPYGGRGNSPYGGRGNSPYGGRGNSPYGGRGNSPYGGRGNSPYGGRGNSPYGGRGNSPYGGRGNSPYGGRGNSPYGGRGNSPYGGRGNSPYGGRGNSPYGGRGNSPYGGRGNSPYGGRGNSPYGGRGNSPYGGRGNSPYGGRGNSPYGGRGNSPYGGRGNSPYGGRGNSPYGGRGNSPYGGRGNSPYGGRGNSPYGGRGNSPYGGRGNSPYGGRGNSPYGGRGNSPYGGRGNSPYGGRGNSPYGGRGNSPYGGRGNSPYGGRGNSPYGGRGNSPYGGRGNSPYGGRGNSPYGGRGNSPYGGRGNSPYGGRGNSPYGGRGNSPYGGRGNSPYGGRGNSPYGGRGNSPYGGRGNSPYGGRGNSPYGGRGNSPYGGRGNSPYGGRGNSPYGGRGNSPYGGRGNSPYGGRGNSPYGGRGNSPYGGRGNSPYGGRGNSPYGGRGNSPYGGRGNSPYGGRGNSPYGGRGNSPYGGRGNSPYGGRGNSPYGGRGNSPYGGRGNSPYGGRGNSPYGGRGNSPYGGRGNSPYGGRGNSPYGGRGNSPYGGRGNSPYGGRGNSPYGGRGNSPYGGRGNSPYGGRGNSPYGGRGNSPYGGRGNSPYGGRGNSPYGGRGNSPYGGRGNSPYGGRGNSPYGGRGNSPYGGRGNSPYGGRGNSPYGGRGNSPYGGRGNSPYGGRGNSPYGGRGNSPYGGRGNSPYGGRGNSPYGGRGNSPYGGRGNSPYGGRGNSPYGGRGNSPYGGRGNSPYGGRGNSPYGGRGNSPYGGRGNSPYGGRGNSPYGGRGNSPYGGRGNSPYGGRGNSPYGGRGNSPYGGRGNSPYGGRGNSPYGGRGNSPYGGRGNSPYGGRGNSPYGGRGNSPYGGRGNSPYGGRGNSPYGGRGNSPYGGRGNSPYGGRGNSPYGGRGNSPYGGRGNSPYGGRGNSPYGGRGNSPYGGRGNSPYGGRGNSPYGGRGNSPYGGRGNSPYGGRGNSPYGGRGNSPYGGRGNSPYGGRGNSPYGGRGNSPYGGRGNSPYGGRGNSPYGGRGNSPYGGRGNSPYGGRGNSPYGGRGNSPYGGRGNSPYGGRGNSPYGGRGNSPYGGRGNSPYGGRGNSPYGGRGNSPYGGRGNSPYGGRGNSPYGGRGNSPYGGRGNSPYGGRGNSPYGGRGNSPYGGRGNSPYGGRGNSPYGGRGNSPYGGRGNSPYGGRGNSPYGGRGNSPYGGRGNSPYGGRGNSPYGGRGNSPYGGRGNSPYGGRGNSPYGGRGNSPYGGRGNSPYGGRGNSPYGGRGNSPYGGRGNSPYGGRGNSPYGGRGNSPYGGRGNSPYGGRGNSPYGGRGNSPYGGRGNSPYGGRGNSPYGGRGNSPYGGRGNSPYGGRGNSPYGGRGNSPYGGRGNSPYGGRGNSPYGGRGNSPYGGRGNSPYGGRGNSPYGGRGNSPYGGRGNSPYGGRGNSPYGGRGNSPYGGRGNSPYGGRGNSPYGGRGNSPYGGRGNSPYGGRGNSPYGGRGNSPYGGRGNSPYGGRGNSPYGGRGNSPYGGRGNSPYGGRGNSPYGGRGNSPYGGRGNSPYGGRGNSPYGGRGNSPYGGRGNSPYGGRGNSPYGGRGNSPYGGRGNSPYGGRGNSPYGGRGNSPYGGRGNSPYGGRGNSPYGGRGNSPYGGRGNSPYGGRGNSPYGGRGNSPYGGRGNSPYGGRGNSPYGGRGNSPYGGRGNSPYGGRGNSPYGGRGNSPYGGRGNSPYGGRGNSPYGGRGNSPYGGRGNSPYGGRGNSPYGGRGNSPYGGRGNSPYGGRGNSPYGGRGNSPYGGRGNSPYGGRGNSPYGGRGNSPYGGRGNSPYGGRGNSPYGGRGNSPYGGRGNSPYGGRGNSPYGGRGNSPYGGRGNSPYGGRGNSPYGGRGNSPYGGRGNSPYGGRGNSPYGGRGNSPYGGRGNSPYGGRGNSPYGGRGNSPYGGRGNSPYGGRGNSPYGGRGNSPYGGRGNSPYGGRGNSPYGGRGNSPYGGRGNSPYGGRGNSPYGGRGNSPYGGRGNSPYGGRGNSPYGGRGNSPYGGRGNSPYGGRGNSPYGGRGNSPYGGRGNSPYGGRGNSPYGGRGNSPYGGRGNSPYGGRGNSPYGGRGNSPYGGRGNSPYGGRGNSPYGGRGNSPYGGRGNSPYGGRGNSPYGGRGNSPYGGRGNSPYGGRGNSPYGGRGNSPYGGRGNSPYGGRGNSPYGGRGNSPYGGRGNSPYGGRGNSPYGGRGNSPYGGRGNSPYGGRGNSPYGGRGNSPYGGRGNSPYGGRGNSPYGGRGNSPYGGRGNSPYGGRGNSPYGGRGNSPYGGRGNSPYGGRGNSPYGGRGNSPYGGRGNSPYGGRGNSPYGGRGNSPYGGRGNSPYGGRGNSPYGGRGNSPYGGRGNSPYGGRGNSPYGGRGNSPYGGRGNSPYGGRGNSPYGGRGNSPYGGRGNSPYGGRGNSPYGGRGNSPYGGRGNSPYGGRGNSPYGGRGNSPYGGRGNSPYGGRGNSPYGGRGNSPYGGRGNSPYGGRGNSPYGGRGNSPYGGRGNSPYGGRGNSPYGGRGNSPYGGRGNSPYGGRGNSPYGGRGNSPYGGRGNSPYGGRGNSPYGGRGNSPYGGRGNSPYGGRGNSPYGGRGNSPYGGRGNSPYGGRGNSPYGGRGNSPYGGRGNSPYGGRGNSPYGGRGNSPYGGRGNSPYGGRGNSPYGGRGNSPYGGRGNSPYGGRGNSPYGGRGNSPYGGRGNSPYGGRGNSPYGGRGNSPYGGRGNSPYGGRGNSPYGGRGNSPYGGRGNSPYGGRGNSPYGGRGNSPYGGRGNSPYGGRGNSPYGGRGNSPYGGRGNSPYGGRGNSPYGGRGNSPYGGRGNSPYG

SEQ ID NO: 10 - protein, 2500 aa, Artificial Sequence
  elastin-like polypeptide
  MISC_FEATURE (4)..(4): Xaa can be any naturally occurring amino acid
  MISC_FEATURE (6)..(2500): May be present or absent in groups of the repeat unit Val Pro Gly Xaa Gly
  MISC_FEATURE (9)..(9): Xaa can be any naturally occurring amino acid
  MISC_FEATURE (14)..(14): Xaa can be any naturally occurring amino acid
  MISC_FEATURE (19)..(19): Xaa can be any naturally occurring amino acid
  MISC_FEATURE (24)..(24): Xaa can be any naturally occurring amino acid
  MISC_FEATURE (29)..(29): Xaa can be any naturally occurring amino acid
  MISC_FEATURE (34)..(34): Xaa can be any naturally occurring amino acid
  MISC_FEATURE (39)..(39): Xaa can be any naturally occurring amino acid
  MISC_FEATURE (44)..(44): Xaa can be any naturally occurring amino acid
  MISC_FEATURE (49)..(49): Xaa can be any naturally occurring amino acid
  MISC_FEATURE (54)..(54): Xaa can be any naturally occurring amino acid
  MISC_FEATURE (59)..(59): Xaa can be any naturally occurring amino acid
  MISC_FEATURE (64)..(64): Xaa can be any naturally occurring amino acid
  MISC_FEATURE (69)..(69): Xaa can be any naturally occurring amino acid
  MISC_FEATURE (74)..(74): Xaa can be any naturally occurring amino acid
  MISC_FEATURE (79)..(79): Xaa can be any naturally occurring amino acid
  MISC_FEATURE (84)..(84): Xaa can be any naturally occurring amino acid
  MISC_FEATURE (89)..(89): Xaa can be any naturally occurring amino acid
  MISC_FEATURE (94)..(94): Xaa can be any naturally occurring amino acid
  MISC_FEATURE (99)..(99): Xaa can be any naturally occurring amino acid
  MISC_FEATURE (104)..(104): Xaa can be any naturally occurring amino acid
  MISC_FEATURE (109)..(109): Xaa can be any naturally occurring amino acid
  MISC_FEATURE (114)..(114): Xaa can be any naturally occurring amino acid
  MISC_FEATURE (119)..(119): Xaa can be any naturally occurring amino acid
  MISC_FEATURE (124)..(124): Xaa can be any naturally occurring amino acid
  MISC_FEATURE (129)..(129): Xaa can be any naturally occurring amino acid
  MISC_FEATURE (134)..(134): Xaa can be any naturally occurring amino acid
  MISC_FEATURE (139)..(139): Xaa can be any naturally occurring amino acid
  MISC_FEATURE (144)..(144): Xaa can be any naturally occurring amino acid
  MISC_FEATURE (149)..(149): Xaa can be any naturally occurring amino acid
  MISC_FEATURE (154)..(154): Xaa can be any naturally occurring amino acid
  MISC_FEATURE (159)..(159): Xaa can be any naturally occurring amino acid
  MISC_FEATURE (164)..(164): Xaa can be any naturally occurring amino acid
  MISC_FEATURE (169)..(169): Xaa can be any naturally occurring amino acid
  MISC_FEATURE (174)..(174): Xaa can be any naturally occurring amino acid
  MISC_FEATURE (179)..(179): Xaa can be any naturally occurring amino acid
  MISC_FEATURE (184)..(184): Xaa can be any naturally occurring amino acid
  MISC_FEATURE (189)..(189): Xaa can be any naturally occurring amino acid
  MISC_FEATURE (194)..(194): Xaa can be any naturally occurring amino acid
  MISC_FEATURE (199)..(199): Xaa can be any naturally occurring amino acid
  MISC_FEATURE (204)..(204): Xaa can be any naturally occurring amino acid
  MISC_FEATURE (209)..(209): Xaa can be any naturally occurring amino acid
  MISC_FEATURE (214)..(214): Xaa can be any naturally occurring amino acid
  MISC_FEATURE (219)..(219): Xaa can be any naturally occurring amino acid
  MISC_FEATURE (224)..(224): Xaa can be any naturally occurring amino acid
  MISC_FEATURE (229)..(229): Xaa can be any naturally occurring amino acid
  MISC_FEATURE (234)..(234): Xaa can be any naturally occurring amino acid
  MISC_FEATURE (239)..(239): Xaa can be any naturally occurring amino acid
  MISC_FEATURE (244)..(244): Xaa can be any naturally occurring amino acid
  MISC_FEATURE (249)..(249): Xaa can be any naturally occurring amino acid
  MISC_FEATURE (254)..(254): Xaa can be any naturally occurring amino acid
  MISC_FEATURE (259)..(259): Xaa can be any naturally occurring amino acid
  MISC_FEATURE (264)..(264): Xaa can be any naturally occurring amino acid
  MISC_FEATURE (269)..(269): Xaa can be any naturally occurring amino acid
  MISC_FEATURE (274)..(274): Xaa can be any naturally occurring amino acid
  MISC_FEATURE (279)..(279): Xaa can be any naturally occurring amino acid
  MISC_FEATURE (284)..(284): Xaa can be any naturally occurring amino acid
  MISC_FEATURE (289)..(289): Xaa can be any naturally occurring amino acid
  MISC_FEATURE (294)..(294): Xaa can be any naturally occurring amino acid
  MISC_FEATURE (299)..(299): Xaa can be any naturally occurring amino acid
  MISC_FEATURE (304)..(304): Xaa can be any naturally occurring amino acid
  MISC_FEATURE (309)..(309): Xaa can be any naturally occurring amino acid
  MISC_FEATURE (314)..(314): Xaa can be any naturally occurring amino acid
  MISC_FEATURE (319)..(319): Xaa can be any naturally occurring amino acid
  MISC_FEATURE (324)..(324): Xaa can be any naturally occurring amino acid
  MISC_FEATURE (329)..(329): Xaa can be any naturally occurring amino acid
  MISC_FEATURE (334)..(334): Xaa can be any naturally occurring amino acid
  MISC_FEATURE (339)..(339): Xaa can be any naturally occurring amino acid
  MISC_FEATURE (344)..(344): Xaa can be any naturally occurring amino acid
  MISC_FEATURE (349)..(349): Xaa can be any naturally occurring amino acid
  MISC_FEATURE (354)..(354): Xaa can be any naturally occurring amino acid
  MISC_FEATURE (359)..(359): Xaa can be any naturally occurring amino acid
  MISC_FEATURE (364)..(364): Xaa can be any naturally occurring amino acid
  MISC_FEATURE (369)..(369): Xaa can be any naturally occurring amino acid
  MISC_FEATURE (374)..(374): Xaa can be any naturally occurring amino acid
  MISC_FEATURE (379)..(379): Xaa can be any naturally occurring amino acid
  MISC_FEATURE (384)..(384): Xaa can be any naturally occurring amino acid
  MISC_FEATURE (389)..(389): Xaa can be any naturally occurring amino acid
  MISC_FEATURE (394)..(394): Xaa can be any naturally occurring amino acid
  MISC_FEATURE (399)..(399): Xaa can be any naturally occurring amino acid
  MISC_FEATURE (404)..(404): Xaa can be any naturally occurring amino acid
  MISC_FEATURE (409)..(409): Xaa can be any naturally occurring amino acid
  MISC_FEATURE (414)..(414): Xaa can be any naturally occurring amino acid
  MISC_FEATURE (419)..(419): Xaa can be any naturally occurring amino acid
  MISC_FEATURE (424)..(424): Xaa can be any naturally occurring amino acid
  MISC_FEATURE (429)..(429): Xaa can be any naturally occurring amino acid
  MISC_FEATURE (434)..(434): Xaa can be any naturally occurring amino acid
  MISC_FEATURE (439)..(439): Xaa can be any naturally occurring amino acid
  MISC_FEATURE (444)..(444): Xaa can be any naturally occurring amino acid
  MISC_FEATURE (449)..(449): Xaa can be any naturally occurring amino acid
  MISC_FEATURE (454)..(454): Xaa can be any naturally occurring amino acid
  MISC_FEATURE (459)..(459): Xaa can be any naturally occurring amino acid
  MISC_FEATURE (464)..(464): Xaa can be any naturally occurring amino acid
  MISC_FEATURE (469)..(469): Xaa can be any naturally occurring amino acid
  MISC_FEATURE (474)..(474): Xaa can be any naturally occurring amino acid
  MISC_FEATURE (479)..(479): Xaa can be any naturally occurring amino acid
  MISC_FEATURE (484)..(484): Xaa can be any naturally occurring amino acid
  MISC_FEATURE (489)..(489): Xaa can be any naturally occurring amino acid
  MISC_FEATURE (494)..(494): Xaa can be any naturally occurring amino acid
  MISC_FEATURE (499)..(499): Xaa can be any naturally occurring amino acid
  MISC_FEATURE (504)..(504): Xaa can be any naturally occurring amino acid
  MISC_FEATURE (509)..(509): Xaa can be any naturally occurring amino acid
  MISC_FEATURE (514)..(514): Xaa can be any naturally occurring amino acid
  MISC_FEATURE (519)..(519): Xaa can be any naturally occurring amino acid
  MISC_FEATURE (524)..(524): Xaa can be any naturally occurring amino acid
  MISC_FEATURE (529)..(529): Xaa can be any naturally occurring amino acid
  MISC_FEATURE (534)..(534): Xaa can be any naturally occurring amino acid
  MISC_FEATURE (539)..(539): Xaa can be any naturally occurring amino acid
  MISC_FEATURE (544)..(544): Xaa can be any naturally occurring amino acid
  MISC_FEATURE (549)..(549): Xaa can be any naturally occurring amino acid
  MISC_FEATURE (554)..(554): Xaa can be any naturally occurring amino acid
  MISC_FEATURE (559)..(559): Xaa can be any naturally occurring amino acid
  MISC_FEATURE (564)..(564): Xaa can be any naturally occurring amino acid
  MISC_FEATURE (569)..(569): Xaa can be any naturally occurring amino acid
  MISC_FEATURE (574)..(574): Xaa can be any naturally occurring amino acid
  MISC_FEATURE (579)..(579): Xaa can be any naturally occurring amino acid
  MISC_FEATURE (584)..(584): Xaa can be any naturally occurring amino acid
  MISC_FEATURE (589)..(589): Xaa can be any naturally occurring amino acid
  MISC_FEATURE (594)..(594): Xaa can be any naturally occurring amino acid
  MISC_FEATURE (599)..(599): Xaa can be any naturally occurring amino acid
  MISC_FEATURE (604)..(604): Xaa can be any naturally occurring amino acid
  MISC_FEATURE (609)..(609): Xaa can be any naturally occurring amino acid
  MISC_FEATURE (614)..(614): Xaa can be any naturally occurring amino acid
  MISC_FEATURE (619)..(619): Xaa can be any naturally occurring amino acid
  MISC_FEATURE (624)..(624): Xaa can be any naturally occurring amino acid
  MISC_FEATURE (629)..(629): Xaa can be any naturally occurring amino acid
  MISC_FEATURE (634)..(634): Xaa can be any naturally occurring amino acid
  MISC_FEATURE (639)..(639): Xaa can be any naturally occurring amino acid
  MISC_FEATURE (644)..(644): Xaa can be any naturally occurring amino acid
  MISC_FEATURE (649)..(649): Xaa can be any naturally occurring amino acid
  MISC_FEATURE (654)..(654): Xaa can be any naturally occurring amino acid
  MISC_FEATURE (659)..(659): Xaa can be any naturally occurring amino acid
  MISC_FEATURE (664)..(664): Xaa can be any naturally occurring amino acid
  MISC_FEATURE (669)..(669): Xaa can be any naturally occurring amino acid
  MISC_FEATURE (674)..(674): Xaa can be any naturally occurring amino acid
  MISC_FEATURE (679)..(679): Xaa can be any naturally occurring amino acid
  MISC_FEATURE (684)..(684): Xaa can be any naturally occurring amino acid
  MISC_FEATURE (689)..(689): Xaa can be any naturally occurring amino acid
  MISC_FEATURE (694)..(694): Xaa can be any naturally occurring amino acid
  MISC_FEATURE (699)..(699): Xaa can be any naturally occurring amino acid
  MISC_FEATURE (704)..(704): Xaa can be any naturally occurring amino acid
  MISC_FEATURE (709)..(709): Xaa can be any naturally occurring amino acid
  MISC_FEATURE (714)..(714): Xaa can be any naturally occurring amino acid
  MISC_FEATURE (719)..(719): Xaa can be any naturally occurring amino acid
  MISC_FEATURE (724)..(724): Xaa can be any naturally occurring amino acid
  MISC_FEATURE (729)..(729): Xaa can be any naturally occurring amino acid
  MISC_FEATURE (734)..(734): Xaa can be any naturally occurring amino acid
  MISC_FEATURE (739)..(739): Xaa can be any naturally occurring amino acid
  MISC_FEATURE (744)..(744): Xaa can be any naturally occurring amino acid
  MISC_FEATURE (749)..(749): Xaa can be any naturally occurring amino acid
  MISC_FEATURE (754)..(754): Xaa can be any naturally occurring amino acid
  MISC_FEATURE (759)..(759): Xaa can be any naturally occurring amino acid
  MISC_FEATURE (764)..(764): Xaa can be any naturally occurring amino acid
  MISC_FEATURE (769)..(769): Xaa can be any naturally occurring amino acid
  MISC_FEATURE (774)..(774): Xaa can be any naturally occurring amino acid
  MISC_FEATURE (779)..(779): Xaa can be any naturally occurring amino acid
  MISC_FEATURE (784)..(784): Xaa can be any naturally occurring amino acid
  MISC_FEATURE (789)..(789): Xaa can be any naturally occurring amino acid
  MISC_FEATURE (794)..(794): Xaa can be any naturally occurring amino acid
  MISC_FEATURE (799)..(799): Xaa can be any naturally occurring amino acid
  MISC_FEATURE (804)..(804): Xaa can be any naturally occurring amino acid
  MISC_FEATURE (809)..(809): Xaa can be any naturally occurring amino acid
  MISC_FEATURE (814)..(814): Xaa can be any naturally occurring amino acid
  MISC_FEATURE (819)..(819): Xaa can be any naturally occurring amino acid
  MISC_FEATURE (824)..(824): Xaa can be any naturally occurring amino acid
  MISC_FEATURE (829)..(829): Xaa can be any naturally occurring amino acid
  MISC_FEATURE (834)..(834): Xaa can be any naturally occurring amino acid
  MISC_FEATURE (839)..(839): Xaa can be any naturally occurring amino acid
  MISC_FEATURE (844)..(844): Xaa can be any naturally occurring amino acid
  MISC_FEATURE (849)..(849): Xaa can be any naturally occurring amino acid
  MISC_FEATURE (854)..(854): Xaa can be any naturally occurring amino acid
  MISC_FEATURE (859)..(859): Xaa can be any naturally occurring amino acid
  MISC_FEATURE (864)..(864): Xaa can be any naturally occurring amino acid
  MISC_FEATURE (869)..(869): Xaa can be any naturally occurring amino acid
  MISC_FEATURE (874)..(874): Xaa can be any naturally occurring amino acid
  MISC_FEATURE (879)..(879): Xaa can be any naturally occurring amino acid
  MISC_FEATURE (884)..(884): Xaa can be any naturally occurring amino acid
  MISC_FEATURE (889)..(889): Xaa can be any naturally occurring amino acid
  MISC_FEATURE (894)..(894): Xaa can be any naturally occurring amino acid
  MISC_FEATURE (899)..(899): Xaa can be any naturally occurring amino acid
  MISC_FEATURE (904)..(904): Xaa can be any naturally occurring amino acid
  MISC_FEATURE (909)..(909): Xaa can be any naturally occurring amino acid
  MISC_FEATURE (914)..(914): Xaa can be any naturally occurring amino acid
  MISC_FEATURE (919)..(919): Xaa can be any naturally occurring amino acid
  MISC_FEATURE (924)..(924): Xaa can be any naturally occurring amino acid
  MISC_FEATURE (929)..(929): Xaa can be any naturally occurring amino acid
  MISC_FEATURE (934)..(934): Xaa can be any naturally occurring amino acid
  MISC_FEATURE (939)..(939): Xaa can be any naturally occurring amino acid
  MISC_FEATURE (944)..(944): Xaa can be any naturally occurring amino acid
  MISC_FEATURE (949)..(949): Xaa can be any naturally occurring amino acid
  MISC_FEATURE (954)..(954): Xaa can be any naturally occurring amino acid
  MISC_FEATURE (959)..(959): Xaa can be any naturally occurring amino acid
  MISC_FEATURE (964)..(964): Xaa can be any naturally occurring amino acid
  MISC_FEATURE (969)..(969): Xaa can be any naturally occurring amino acid
  MISC_FEATURE (974)..(974): Xaa can be any naturally occurring amino acid
  MISC_FEATURE (979)..(979): Xaa can be any naturally occurring amino acid
  MISC_FEATURE (984)..(984): Xaa can be any naturally occurring amino acid
  MISC_FEATURE (989)..(989): Xaa can be any naturally occurring amino acid
  MISC_FEATURE (994)..(994): Xaa can be any naturally occurring amino acid
  MISC_FEATURE (999)..(999): Xaa can be any naturally occurring amino acid
  MISC_FEATURE (1004)..(1004): Xaa can be any naturally occurring amino acid
  MISC_FEATURE (1009)..(1009): Xaa can be any naturally occurring amino acid
  MISC_FEATURE (1014)..(1014): Xaa can be any naturally occurring amino acid
  MISC_FEATURE (1019)..(1019): Xaa can be any naturally occurring amino acid
  MISC_FEATURE (1024)..(1024): Xaa can be any naturally occurring amino acid
  MISC_FEATURE (1029)..(1029): Xaa can be any naturally occurring amino acid
  MISC_FEATURE (1034)..(1034): Xaa can be any naturally occurring amino acid
  MISC_FEATURE (1039)..(1039): Xaa can be any naturally occurring amino acid
  MISC_FEATURE (1044)..(1044): Xaa can be any naturally occurring amino acid
  MISC_FEATURE (1049)..(1049): Xaa can be any naturally occurring amino acid
  MISC_FEATURE (1054)..(1054): Xaa can be any naturally occurring amino acid
  MISC_FEATURE (1059)..(1059): Xaa can be any naturally occurring amino acid
  MISC_FEATURE (1064)..(1064): Xaa can be any naturally occurring amino acid
  MISC_FEATURE (1069)..(1069): Xaa can be any naturally occurring amino acid
  MISC_FEATURE (1074)..(1074): Xaa can be any naturally occurring amino acid
  MISC_FEATURE (1079)..(1079): Xaa can be any naturally occurring amino acid
  MISC_FEATURE (1084)..(1084): Xaa can be any naturally occurring amino acid
  MISC_FEATURE (1089)..(1089): Xaa can be any naturally occurring amino acid
  MISC_FEATURE (1094)..(1094): Xaa can be any naturally occurring amino acid
  MISC_FEATURE (1099)..(1099): Xaa can be any naturally occurring amino acid
  MISC_FEATURE (1104)..(1104): Xaa can be any naturally occurring amino acid
  MISC_FEATURE (1109)..(1109): Xaa can be any naturally occurring amino acid
  MISC_FEATURE (1114)..(1114): Xaa can be any naturally occurring amino acid
  MISC_FEATURE (1119)..(1119): Xaa can be any naturally occurring amino acid
  MISC_FEATURE (1124)..(1124): Xaa can be any naturally occurring amino acid
  MISC_FEATURE (1129)..(1129): Xaa can be any naturally occurring amino acid
  MISC_FEATURE (1134)..(1134): Xaa can be any naturally occurring amino acid
  MISC_FEATURE (1139)..(1139): Xaa can be any naturally occurring amino acid
  MISC_FEATURE (1144)..(1144): Xaa can be any naturally occurring amino acid
  MISC_FEATURE (1149)..(1149): Xaa can be any naturally occurring amino acid
  MISC_FEATURE (1154)..(1154): Xaa can be any naturally occurring amino acid
  MISC_FEATURE (1159)..(1159): Xaa can be any naturally occurring amino acid
  MISC_FEATURE (1164)..(1164): Xaa can be any naturally occurring amino acid
  MISC_FEATURE (1169)..(1169): Xaa can be any naturally occurring amino acid
  MISC_FEATURE (1174)..(1174): Xaa can be any naturally occurring amino acid
  MISC_FEATURE (1179)..(1179): Xaa can be any naturally occurring amino acid
  MISC_FEATURE (1184)..(1184): Xaa can be any naturally occurring amino acid
  MISC_FEATURE (1189)..(1189): Xaa can be any naturally occurring amino acid
  MISC_FEATURE (1194)..(1194): Xaa can be any naturally occurring amino acid
  MISC_FEATURE (1199)..(1199): Xaa can be any naturally occurring amino acid
  MISC_FEATURE (1204)..(1204): Xaa can be any naturally occurring amino acid
  MISC_FEATURE (1209)..(1209): Xaa can be any naturally occurring amino acid
  MISC_FEATURE (1214)..(1214): Xaa can be any naturally occurring amino acid
  MISC_FEATURE (1219)..(1219): Xaa can be any naturally occurring amino acid
  MISC_FEATURE (1224)..(1224): Xaa can be any naturally occurring amino acid
  MISC_FEATURE (1229)..(1229): Xaa can be any naturally occurring amino acid
  MISC_FEATURE (1234)..(1234): Xaa can be any naturally occurring amino acid
  MISC_FEATURE (1239)..(1239): Xaa can be any naturally occurring amino acid
  MISC_FEATURE (1244)..(1244): Xaa can be any naturally occurring amino acid
  MISC_FEATURE (1249)..(1249): Xaa can be any naturally occurring amino acid
  MISC_FEATURE (1254)..(1254): Xaa can be any naturally occurring amino acid
  MISC_FEATURE (1259)..(1259): Xaa can be any naturally occurring amino acid
  MISC_FEATURE (1264)..(1264): Xaa can be any naturally occurring amino acid
  MISC_FEATURE (1269)..(1269): Xaa can be any naturally occurring amino acid
  MISC_FEATURE (1274)..(1274): Xaa can be any naturally occurring amino acid
  MISC_FEATURE (1279)..(1279): Xaa can be any naturally occurring amino acid
  MISC_FEATURE (1284)..(1284): Xaa can be any naturally occurring amino acid
  MISC_FEATURE (1289)..(1289): Xaa can be any naturally occurring amino acid
  MISC_FEATURE (1294)..(1294): Xaa can be any naturally occurring amino acid
  MISC_FEATURE (1299)..(1299): Xaa can be any naturally occurring amino acid
  MISC_FEATURE (1304)..(1304): Xaa can be any naturally occurring amino acid
  MISC_FEATURE (1309)..(1309): Xaa can be any naturally occurring amino acid
  MISC_FEATURE (1314)..(1314): Xaa can be any naturally occurring amino acid
  MISC_FEATURE (1319)..(1319): Xaa can be any naturally occurring amino acid
  MISC_FEATURE (1324)..(1324): Xaa can be any naturally occurring amino acid
  MISC_FEATURE (1329)..(1329): Xaa can be any naturally occurring amino acid
  MISC_FEATURE (1334)..(1334): Xaa can be any naturally occurring amino acid
  MISC_FEATURE (1339)..(1339): Xaa can be any naturally occurring amino acid
  MISC_FEATURE (1344)..(1344): Xaa can be any naturally occurring amino acid
  MISC_FEATURE (1349)..(1349): Xaa can be any naturally occurring amino acid
  MISC_FEATURE (1354)..(1354): Xaa can be any naturally occurring amino acid
  MISC_FEATURE (1359)..(1359): Xaa can be any naturally occurring amino acid
  MISC_FEATURE (1364)..(1364): Xaa can be any naturally occurring amino acid
  MISC_FEATURE (1369)..(1369): Xaa can be any naturally occurring amino acid
  MISC_FEATURE (1374)..(1374): Xaa can be any naturally occurring amino acid
  MISC_FEATURE (1379)..(1379): Xaa can be any naturally occurring amino acid
  MISC_FEATURE (1384)..(1384): Xaa can be any naturally occurring amino acid
  MISC_FEATURE (1389)..(1389): Xaa can be any naturally occurring amino acid
  MISC_FEATURE (1394)..(1394): Xaa can be any naturally occurring amino acid
  MISC_FEATURE (1399)..(1399): Xaa can be any naturally occurring amino acid
  MISC_FEATURE (1404)..(1404): Xaa can be any naturally occurring amino acid
  MISC_FEATURE (1409)..(1409): Xaa can be any naturally occurring amino acid
  MISC_FEATURE (1414)..(1414): Xaa can be any naturally occurring amino acid
  MISC_FEATURE (1419)..(1419): Xaa can be any naturally occurring amino acid
  MISC_FEATURE (1424)..(1424): Xaa can be any naturally occurring amino acid
  MISC_FEATURE (1429)..(1429): Xaa can be any naturally occurring amino acid
  MISC_FEATURE (1434)..(1434): Xaa can be any naturally occurring amino acid
  MISC_FEATURE (1439)..(1439): Xaa can be any naturally occurring amino acid
  MISC_FEATURE (1444)..(1444): Xaa can be any naturally occurring amino acid
  MISC_FEATURE (1449)..(1449): Xaa can be any naturally occurring amino acid
  MISC_FEATURE (1454)..(1454): Xaa can be any naturally occurring amino acid
  MISC_FEATURE (1459)..(1459): Xaa can be any naturally occurring amino acid
  MISC_FEATURE (1464)..(1464): Xaa can be any naturally occurring amino acid
  MISC_FEATURE (1469)..(1469): Xaa can be any naturally occurring amino acid
  MISC_FEATURE (1474)..(1474): Xaa can be any naturally occurring amino acid
  MISC_FEATURE (1479)..(1479): Xaa can be any naturally occurring amino acid
  MISC_FEATURE (1484)..(1484): Xaa can be any naturally occurring amino acid
  MISC_FEATURE (1489)..(1489): Xaa can be any naturally occurring amino acid
  MISC_FEATURE (1494)..(1494): Xaa can be any naturally occurring amino acid
  MISC_FEATURE (1499)..(1499): Xaa can be any naturally occurring amino acid
  MISC_FEATURE (1504)..(1504): Xaa can be any naturally occurring amino acid
  MISC_FEATURE (1509)..(1509): Xaa can be any naturally occurring amino acid
  MISC_FEATURE (1514)..(1514): Xaa can be any naturally occurring amino acid
  MISC_FEATURE (1519)..(1519): Xaa can be any naturally occurring amino acid
  MISC_FEATURE (1524)..(1524): Xaa can be any naturally occurring amino acid
  MISC_FEATURE (1529)..(1529): Xaa can be any naturally occurring amino acid
  MISC_FEATURE (1534)..(1534): Xaa can be any naturally occurring amino acid
  MISC_FEATURE (1539)..(1539): Xaa can be any naturally occurring amino acid
  MISC_FEATURE (1544)..(1544): Xaa can be any naturally occurring amino acid
  MISC_FEATURE (1549)..(1549): Xaa can be any naturally occurring amino acid
  MISC_FEATURE (1554)..(1554): Xaa can be any naturally occurring amino acid
  MISC_FEATURE (1559)..(1559): Xaa can be any naturally occurring amino acid
  MISC_FEATURE (1564)..(1564): Xaa can be any naturally occurring amino acid
  MISC_FEATURE (1569)..(1569): Xaa can be any naturally occurring amino acid
  MISC_FEATURE (1574)..(1574): Xaa can be any naturally occurring amino acid
  MISC_FEATURE (1579)..(1579): Xaa can be any naturally occurring amino acid
  MISC_FEATURE (1584)..(1584): Xaa can be any naturally occurring amino acid
  MISC_FEATURE (1589)..(1589): Xaa can be any naturally occurring amino acid
  MISC_FEATURE (1594)..(1594): Xaa can be any naturally occurring amino acid
  MISC_FEATURE (1599)..(1599): Xaa can be any naturally occurring amino acid
  MISC_FEATURE (1604)..(1604): Xaa can be any naturally occurring amino acid
  MISC_FEATURE (1609)..(1609): Xaa can be any naturally occurring amino acid
  MISC_FEATURE (1614)..(1614): Xaa can be any naturally occurring amino acid
  MISC_FEATURE (1619)..(1619): Xaa can be any naturally occurring amino acid
  MISC_FEATURE (1624)..(1624): Xaa can be any naturally occurring amino acid
  MISC_FEATURE (1629)..(1629): Xaa can be any naturally occurring amino acid
  MISC_FEATURE (1634)..(1634): Xaa can be any naturally occurring amino acid
  MISC_FEATURE (1639)..(1639): Xaa can be any naturally occurring amino acid
  MISC_FEATURE (1644)..(1644): Xaa can be any naturally occurring amino acid
  MISC_FEATURE (1649)..(1649): Xaa can be any naturally occurring amino acid
  MISC_FEATURE (1654)..(1654): Xaa can be any naturally occurring amino acid
  MISC_FEATURE (1659)..(1659): Xaa can be any naturally occurring amino acid
  MISC_FEATURE (1664)..(1664): Xaa can be any naturally occurring amino acid
  MISC_FEATURE (1669)..(1669): Xaa can be any naturally occurring amino acid
  MISC_FEATURE (1674)..(1674): Xaa can be any naturally occurring amino acid
  MISC_FEATURE (1679)..(1679): Xaa can be any naturally occurring amino acid
  MISC_FEATURE (1684)..(1684): Xaa can be any naturally occurring amino acid
  MISC_FEATURE (1689)..(1689): Xaa can be any naturally occurring amino acid
  MISC_FEATURE (1694)..(1694): Xaa can be any naturally occurring amino acid
  MISC_FEATURE (1699)..(1699): Xaa can be any naturally occurring amino acid
  MISC_FEATURE (1704)..(1704): Xaa can be any naturally occurring amino acid
  MISC_FEATURE (1709)..(1709): Xaa can be any naturally occurring amino acid
  MISC_FEATURE (1714)..(1714): Xaa can be any naturally occurring amino acid
  MISC_FEATURE (1719)..(1719): Xaa can be any naturally occurring amino acid
  MISC_FEATURE (1724)..(1724): Xaa can be any naturally occurring amino acid
  MISC_FEATURE (1729)..(1729): Xaa can be any naturally occurring amino acid
  MISC_FEATURE (1734)..(1734): Xaa can be any naturally occurring amino acid
  MISC_FEATURE (1739)..(1739): Xaa can be any naturally occurring amino acid
  MISC_FEATURE (1744)..(1744): Xaa can be any naturally occurring amino acid
  MISC_FEATURE (1749)..(1749): Xaa can be any naturally occurring amino acid
  MISC_FEATURE (1754)..(1754): Xaa can be any naturally occurring amino acid
  MISC_FEATURE (1759)..(1759): Xaa can be any naturally occurring amino acid
  MISC_FEATURE (1764)..(1764): Xaa can be any naturally occurring amino acid
  MISC_FEATURE (1769)..(1769): Xaa can be any naturally occurring amino acid
  MISC_FEATURE (1774)..(1774): Xaa can be any naturally occurring amino acid
  MISC_FEATURE (1779)..(1779): Xaa can be any naturally occurring amino acid
  MISC_FEATURE (1784)..(1784): Xaa can be any naturally occurring amino acid
  MISC_FEATURE (1789)..(1789): Xaa can be any naturally occurring amino acid
  MISC_FEATURE (1794)..(1794): Xaa can be any naturally occurring amino acid
  MISC_FEATURE (1799)..(1799): Xaa can be any naturally occurring amino acid
  MISC_FEATURE (1804)..(1804): Xaa can be any naturally occurring amino acid
  MISC_FEATURE (1809)..(1809): Xaa can be any naturally occurring amino acid
  MISC_FEATURE (1814)..(1814): Xaa can be any naturally occurring amino acid
  MISC_FEATURE (1819)..(1819): Xaa can be any naturally occurring amino acid
  MISC_FEATURE (1824)..(1824): Xaa can be any naturally occurring amino acid
  MISC_FEATURE (1829)..(1829): Xaa can be any naturally occurring amino acid
  MISC_FEATURE (1834)..(1834): Xaa can be any naturally occurring amino acid
  MISC_FEATURE (1839)..(1839): Xaa can be any naturally occurring amino acid
  MISC_FEATURE (1844)..(1844): Xaa can be any naturally occurring amino acid
  MISC_FEATURE (1849)..(1849): Xaa can be any naturally occurring amino acid
  MISC_FEATURE (1854)..(1854): Xaa can be any naturally occurring amino acid
  MISC_FEATURE (1859)..(1859): Xaa can be any naturally occurring amino acid
  MISC_FEATURE (1864)..(1864): Xaa can be any naturally occurring amino acid
  MISC_FEATURE (1869)..(1869): Xaa can be any naturally occurring amino acid
  MISC_FEATURE (1874)..(1874): Xaa can be any naturally occurring amino acid
  MISC_FEATURE (1879)..(1879): Xaa can be any naturally occurring amino acid
  MISC_FEATURE (1884)..(1884): Xaa can be any naturally occurring amino acid
  MISC_FEATURE (1889)..(1889): Xaa can be any naturally occurring amino acid
  MISC_FEATURE (1894)..(1894): Xaa can be any naturally occurring amino acid
  MISC_FEATURE (1899)..(1899): Xaa can be any naturally occurring amino acid
  MISC_FEATURE (1904)..(1904): Xaa can be any naturally occurring amino acid
  MISC_FEATURE (1909)..(1909): Xaa can be any naturally occurring amino acid
  MISC_FEATURE (1914)..(1914): Xaa can be any naturally occurring amino acid
  MISC_FEATURE (1919)..(1919): Xaa can be any naturally occurring amino acid
  MISC_FEATURE (1924)..(1924): Xaa can be any naturally occurring amino acid
  MISC_FEATURE (1929)..(1929): Xaa can be any naturally occurring amino acid
  MISC_FEATURE (1934)..(1934): Xaa can be any naturally occurring amino acid
  MISC_FEATURE (1939)..(1939): Xaa can be any naturally occurring amino acid
  MISC_FEATURE (1944)..(1944): Xaa can be any naturally occurring amino acid
  MISC_FEATURE (1949)..(1949): Xaa can be any naturally occurring amino acid
  MISC_FEATURE (1954)..(1954): Xaa can be any naturally occurring amino acid
  MISC_FEATURE (1959)..(1959): Xaa can be any naturally occurring amino acid
  MISC_FEATURE (1964)..(1964): Xaa can be any naturally occurring amino acid
  MISC_FEATURE (1969)..(1969): Xaa can be any naturally occurring amino acid
  MISC_FEATURE (1974)..(1974): Xaa can be any naturally occurring amino acid
  MISC_FEATURE (1979)..(1979): Xaa can be any naturally occurring amino acid
  MISC_FEATURE (1984)..(1984): Xaa can be any naturally occurring amino acid
  MISC_FEATURE (1989)..(1989): Xaa can be any naturally occurring amino acid
  MISC_FEATURE (1994)..(1994): Xaa can be any naturally occurring amino acid
  MISC_FEATURE (1999)..(1999): Xaa can be any naturally occurring amino acid
  MISC_FEATURE (2004)..(2004): Xaa can be any naturally occurring amino acid
  MISC_FEATURE (2009)..(2009): Xaa can be any naturally occurring amino acid
  MISC_FEATURE (2014)..(2014): Xaa can be any naturally occurring amino acid
  MISC_FEATURE (2019)..(2019): Xaa can be any naturally occurring amino acid
  MISC_FEATURE (2024)..(2024): Xaa can be any naturally occurring amino acid
  MISC_FEATURE (2029)..(2029): Xaa can be any naturally occurring amino acid
  MISC_FEATURE (2034)..(2034): Xaa can be any naturally occurring amino acid
  MISC_FEATURE (2039)..(2039): Xaa can be any naturally occurring amino acid
  MISC_FEATURE (2044)..(2044): Xaa can be any naturally occurring amino acid
  MISC_FEATURE (2049)..(2049): Xaa can be any naturally occurring amino acid
  MISC_FEATURE (2054)..(2054): Xaa can be any naturally occurring amino acid
  MISC_FEATURE (2059)..(2059): Xaa can be any naturally occurring amino acid
  MISC_FEATURE (2064)..(2064): Xaa can be any naturally occurring amino acid
  MISC_FEATURE (2069)..(2069): Xaa can be any naturally occurring amino acid
  MISC_FEATURE (2074)..(2074): Xaa can be any naturally occurring amino acid
  MISC_FEATURE (2079)..(2079): Xaa can be any naturally occurring amino acid
  MISC_FEATURE (2084)..(2084): Xaa can be any naturally occurring amino acid
  MISC_FEATURE (2089)..(2089): Xaa can be any naturally occurring amino acid
  MISC_FEATURE (2094)..(2094): Xaa can be any naturally occurring amino acid
  MISC_FEATURE (2099)..(2099): Xaa can be any naturally occurring amino acid
  MISC_FEATURE (2104)..(2104): Xaa can be any naturally occurring amino acid
  MISC_FEATURE (2109)..(2109): Xaa can be any naturally occurring amino acid
  MISC_FEATURE (2114)..(2114): Xaa can be any naturally occurring amino acid
  MISC_FEATURE (2119)..(2119): Xaa can be any naturally occurring amino acid
  MISC_FEATURE (2124)..(2124): Xaa can be any naturally occurring amino acid
  MISC_FEATURE (2129)..(2129): Xaa can be any naturally occurring amino acid
  MISC_FEATURE (2134)..(2134): Xaa can be any naturally occurring amino acid
  MISC_FEATURE (2139)..(2139): Xaa can be any naturally occurring amino acid
  MISC_FEATURE (2144)..(2144): Xaa can be any naturally occurring amino acid
  MISC_FEATURE (2149)..(2149): Xaa can be any naturally occurring amino acid
  MISC_FEATURE (2154)..(2154): Xaa can be any naturally occurring amino acid
  MISC_FEATURE (2159)..(2159): Xaa can be any naturally occurring amino acid
  MISC_FEATURE (2164)..(2164): Xaa can be any naturally occurring amino acid
  MISC_FEATURE (2169)..(2169): Xaa can be any naturally occurring amino acid
  MISC_FEATURE (2174)..(2174): Xaa can be any naturally occurring amino acid
  MISC_FEATURE (2179)..(2179): Xaa can be any naturally occurring amino acid
  MISC_FEATURE (2184)..(2184): Xaa can be any naturally occurring amino acid
  MISC_FEATURE (2189)..(2189): Xaa can be any naturally occurring amino acid
  MISC_FEATURE (2194)..(2194): Xaa can be any naturally occurring amino acid
  MISC_FEATURE (2199)..(2199): Xaa can be any naturally occurring amino acid
  MISC_FEATURE (2204)..(2204): Xaa can be any naturally occurring amino acid
  MISC_FEATURE (2209)..(2209): Xaa can be any naturally occurring amino acid
  MISC_FEATURE (2214)..(2214): Xaa can be any naturally occurring amino acid
  MISC_FEATURE (2219)..(2219): Xaa can be any naturally occurring amino acid
  MISC_FEATURE (2224)..(2224): Xaa can be any naturally occurring amino acid
  MISC_FEATURE (2229)..(2229): Xaa can be any naturally occurring amino acid
  MISC_FEATURE (2234)..(2234): Xaa can be any naturally occurring amino acid
  MISC_FEATURE (2239)..(2239): Xaa can be any naturally occurring amino acid
  MISC_FEATURE (2244)..(2244): Xaa can be any naturally occurring amino acid
  MISC_FEATURE (2249)..(2249): Xaa can be any naturally occurring amino acid
  MISC_FEATURE (2254)..(2254): Xaa can be any naturally occurring amino acid
  MISC_FEATURE (2259)..(2259): Xaa can be any naturally occurring amino acid
  MISC_FEATURE (2264)..(2264): Xaa can be any naturally occurring amino acid
  MISC_FEATURE (2269)..(2269): Xaa can be any naturally occurring amino acid
  MISC_FEATURE (2274)..(2274): Xaa can be any naturally occurring amino acid
  MISC_FEATURE (2279)..(2279): Xaa can be any naturally occurring amino acid
  MISC_FEATURE (2284)..(2284): Xaa can be any naturally occurring amino acid
  MISC_FEATURE (2289)..(2289): Xaa can be any naturally occurring amino acid
  MISC_FEATURE (2294)..(2294): Xaa can be any naturally occurring amino acid
  MISC_FEATURE (2299)..(2299): Xaa can be any naturally occurring amino acid
  MISC_FEATURE (2304)..(2304): Xaa can be any naturally occurring amino acid
  MISC_FEATURE (2309)..(2309): Xaa can be any naturally occurring amino acid
  MISC_FEATURE (2314)..(2314): Xaa can be any naturally occurring amino acid
  MISC_FEATURE (2319)..(2319): Xaa can be any naturally occurring amino acid
  MISC_FEATURE (2324)..(2324): Xaa can be any naturally occurring amino acid
  MISC_FEATURE (2329)..(2329): Xaa can be any naturally occurring amino acid
  MISC_FEATURE (2334)..(2334): Xaa can be any naturally occurring amino acid
  MISC_FEATURE (2339)..(2339): Xaa can be any naturally occurring amino acid
  MISC_FEATURE (2344)..(2344): Xaa can be any naturally occurring amino acid
  MISC_FEATURE (2349)..(2349): Xaa can be any naturally occurring amino acid
  MISC_FEATURE (2354)..(2354): Xaa can be any naturally occurring amino acid
  MISC_FEATURE (2359)..(2359): Xaa can be any naturally occurring amino acid
  MISC_FEATURE (2364)..(2364): Xaa can be any naturally occurring amino acid
  MISC_FEATURE (2369)..(2369): Xaa can be any naturally occurring amino acid
  MISC_FEATURE (2374)..(2374): Xaa can be any naturally occurring amino acid
  MISC_FEATURE (2379)..(2379): Xaa can be any naturally occurring amino acid
  MISC_FEATURE (2384)..(2384): Xaa can be any naturally occurring amino acid
  MISC_FEATURE (2389)..(2389): Xaa can be any naturally occurring amino acid
  MISC_FEATURE (2394)..(2394): Xaa can be any naturally occurring amino acid
  MISC_FEATURE (2399)..(2399): Xaa can be any naturally occurring amino acid
  MISC_FEATURE (2404)..(2404): Xaa can be any naturally occurring amino acid
  MISC_FEATURE (2409)..(2409): Xaa can be any naturally occurring amino acid
  MISC_FEATURE (2414)..(2414): Xaa can be any naturally occurring amino acid
  MISC_FEATURE (2419)..(2419): Xaa can be any naturally occurring amino acid
  MISC_FEATURE (2424)..(2424): Xaa can be any naturally occurring amino acid
  MISC_FEATURE (2429)..(2429): Xaa can be any naturally occurring amino acid
  MISC_FEATURE (2434)..(2434): Xaa can be any naturally occurring amino acid
  MISC_FEATURE (2439)..(2439): Xaa can be any naturally occurring amino acid
  MISC_FEATURE (2444)..(2444): Xaa can be any naturally occurring amino acid
  MISC_FEATURE (2449)..(2449): Xaa can be any naturally occurring amino acid
  MISC_FEATURE (2454)..(2454): Xaa can be any naturally occurring amino acid
  MISC_FEATURE (2459)..(2459): Xaa can be any naturally occurring amino acid
  MISC_FEATURE (2464)..(2464): Xaa can be any naturally occurring amino acid
  MISC_FEATURE (2469)..(2469): Xaa can be any naturally occurring amino acid
  MISC_FEATURE (2474)..(2474): Xaa can be any naturally occurring amino acid
  MISC_FEATURE (2479)..(2479): Xaa can be any naturally occurring amino acid
  MISC_FEATURE (2484)..(2484): Xaa can be any naturally occurring amino acid
  MISC_FEATURE (2489)..(2489): Xaa can be any naturally occurring amino acid
  MISC_FEATURE (2494)..(2494): Xaa can be any naturally occurring amino acid
  MISC_FEATURE (2499)..(2499): Xaa can be any naturally occurring amino acid
VPGXGVPGXGVPGXGVPGXGVPGXGVPGXGVPGXGVPGXGVPGXGVPGXGVPGXGVPGXGVPGXGVPGXGVPGXGVPGXGVPGXGVPGXGVPGXGVPGXGVPGXGVPGXGVPGXGVPGXGVPGXGVPGXGVPGXGVPGXGVPGXGVPGXGVPGXGVPGXGVPGXGVPGXGVPGXGVPGXGVPGXGVPGXGVPGXGVPGXGVPGXGVPGXGVPGXGVPGXGVPGXGVPGXGVPGXGVPGXGVPGXGVPGXGVPGXGVPGXGVPGXGVPGXGVPGXGVPGXGVPGXGVPGXGVPGXGVPGXGVPGXGVPGXGVPGXGVPGXGVPGXGVPGXGVPGXGVPGXGVPGXGVPGXGVPGXGVPGXGVPGXGVPGXGVPGXGVPGXGVPGXGVPGXGVPGXGVPGXGVPGXGVPGXGVPGXGVPGXGVPGXGVPGXGVPGXGVPGXGVPGXGVPGXGVPGXGVPGXGVPGXGVPGXGVPGXGVPGXGVPGXGVPGXGVPGXGVPGXGVPGXGVPGXGVPGXGVPGXGVPGXGVPGXGVPGXGVPGXGVPGXGVPGXGVPGXGVPGXGVPGXGVPGXGVPGXGVPGXGVPGXGVPGXGVPGXGVPGXGVPGXGVPGXGVPGXGVPGXGVPGXGVPGXGVPGXGVPGXGVPGXGVPGXGVPGXGVPGXGVPGXGVPGXGVPGXGVPGXGVPGXGVPGXGVPGXGVPGXGVPGXGVPGXGVPGXGVPGXGVPGXGVPGXGVPGXGVPGXGVPGXGVPGXGVPGXGVPGXGVPGXGVPGXGVPGXGVPGXGVPGXGVPGXGVPGXGVPGXGVPGXGVPGXGVPGXGVPGXGVPGXGVPGXGVPGXGVPGXGVPGXGVPGXGVPGXGVPGXGVPGXGVPGXGVPGXGVPGXGVPGXGVPGXGVPGXGVPGXGVPGXGVPGXGVPGXGVPGXGVPGXGVPGXGVPGXGVPGXGVPGXGVPGXGVPGXGVPGXGVPGXGVPGXGVPGXGVPGXGVPGXGVPGXGVPGXGVPGXGVPGXGVPGXGVPGXGVPGXGVPGXGVPGXGVPGXGVPGXGVPGXGVPGXGVPGXGVPGXGVPGXGVPGXGVPGXGVPGXGVPGXGVPGXGVPGXGVPGXGVPGXGVPGXGVPGXGVPGXGVPGXGVPGXGVPGXGVPGXGVPGXGVPGXGVPGXGVPGXGVPGXGVPGXGVPGXGVPGXGVPGXGVPGXGVPGXGVPGXGVPGXGVPGXGVPGXGVPGXGVPGXGVPGXGVPGXGVPGXGVPGXGVPGXGVPGXGVPGXGVPGXGVPGXGVPGXGVPGXGVPGXGVPGXGVPGXGVPGXGVPGXGVPGXGVPGXGVPGXGVPGXGVPGXGVPGXGVPGXGVPGXGVPGXGVPGXGVPGXGVPGXGVPGXGVPGXGVPGXGVPGXGVPGXGVPGXGVPGXGVPGXGVPGXGVPGXGVPGXGVPGXGVPGXGVPGXGVPGXGVPGXGVPGXGVPGXGVPGXGVPGXGVPGXGVPGXGVPGXGVPGXGVPGXGVPGXGVPGXGVPGXGVPGXGVPGXGVPGXGVPGXGVPGXGVPGXGVPGXGVPGXGVPGXGVPGXGVPGXGVPGXGVPGXGVPGXGVPGXGVPGXGVPGXGVPGXGVPGXGVPGXGVPGXGVPGXGVPGXGVPGXGVPGXGVPGXGVPGXGVPGXGVPGXGVPGXGVPGXGVPGXGVPGXGVPGXGVPGXGVPGXGVPGXGVPGXGVPGXGVPGXGVPGXGVPGXGVPGXGVPGXGVPGXGVPGXGVPGXGVPGXGVPGXGVPGXGVPGXGVPGXGVPGXGVPGXGVPGXGVPGXGVPGXGVPGXGVPGXGVPGXGVPGXGVPGXGVPGXGVPGXGVPGXGVPGXGVPGXGVPGXGVPGXGVPGXGVPGXGVPGXGVPGXGVPGXGVPGXGVPGXGVPGXGVPGXGVPGXGVPGXGVPGXGVPGXGVPGXGVPGXGVPGXGVPGXGVPGXGVPGXGVPGXGVPGXGVPGXGVPGXGVPGXGVPGXGVPGXGVPGXGVPGXGVPGXGVPGXGVPGXGVPGXGVPGXGVPGXGVPGXGVPGXGVPGXGVPGXGVPGXGVPGXGVPGXGVPGXGVPGXGVPGXGVPGXGVPGXGVPGXGVPGXGVPGXGVPGXGVPGXGVPGXGVPGXGVPGXGVPGXGVPGXGVPGXGVPGXGVPGXGVPGXGVPGXGVPGXGVPGXGVPGXGVPGXGVPGXGVPGXGVPGXGVPGXGVPGXGVPGXGVPGXGVPGXGVPGXGVPGXGVPGXGVPGXGVPGXGVPGXGVPGXGVPGXGVPGXGVPGXGVPGXGVPGXGVPGXGVPGXGVPGXGVPGXGVPGXGVPGXGVPGXGVPGXGVPGXGVPGXGVPGXGVPGXGVPGXGVPGXGVPGXGVPGXGVPGXGVPGXGVPGXGVPGXGVPGXGVPGXGVPGXGVPGXGVPGXGVPGXGVPGXGVPGXGVPGXGVPGXGVPGXGVPGXGVPGXGVPGXGVPGXGVPGXGVPGXGVPGXGVPGXGVPGXGVPGXGVPGXGVPGXGVPGXGVPGXG

SEQ ID NO: 11 - protein, 2500 aa, Artificial Sequence
  elastin-like polypeptide
  MISC_FEATURE (6)..(2500): May be present or absent in groups of the repeat unit Gly Val Gly Val Pro
GVGVPGVGVPGVGVPGVGVPGVGVPGVGVPGVGVPGVGVPGVGVPGVGVPGVGVPGVGVPGVGVPGVGVPGVGVPGVGVPGVGVPGVGVPGVGVPGVGVPGVGVPGVGVPGVGVPGVGVPGVGVPGVGVPGVGVPGVGVPGVGVPGVGVPGVGVPGVGVPGVGVPGVGVPGVGVPGVGVPGVGVPGVGVPGVGVPGVGVPGVGVPGVGVPGVGVPGVGVPGVGVPGVGVPGVGVPGVGVPGVGVPGVGVPGVGVPGVGVPGVGVPGVGVPGVGVPGVGVPGVGVPGVGVPGVGVPGVGVPGVGVPGVGVPGVGVPGVGVPGVGVPGVGVPGVGVPGVGVPGVGVPGVGVPGVGVPGVGVPGVGVPGVGVPGVGVPGVGVPGVGVPGVGVPGVGVPGVGVPGVGVPGVGVPGVGVPGVGVPGVGVPGVGVPGVGVPGVGVPGVGVPGVGVPGVGVPGVGVPGVGVPGVGVPGVGVPGVGVPGVGVPGVGVPGVGVPGVGVPGVGVPGVGVPGVGVPGVGVPGVGVPGVGVPGVGVPGVGVPGVGVPGVGVPGVGVPGVGVPGVGVPGVGVPGVGVPGVGVPGVGVPGVGVPGVGVPGVGVPGVGVPGVGVPGVGVPGVGVPGVGVPGVGVPGVGVPGVGVPGVGVPGVGVPGVGVPGVGVPGVGVPGVGVPGVGVPGVGVPGVGVPGVGVPGVGVPGVGVPGVGVPGVGVPGVGVPGVGVPGVGVPGVGVPGVGVPGVGVPGVGVPGVGVPGVGVPGVGVPGVGVPGVGVPGVGVPGVGVPGVGVPGVGVPGVGVPGVGVPGVGVPGVGVPGVGVPGVGVPGVGVPGVGVPGVGVPGVGVPGVGVPGVGVPGVGVPGVGVPGVGVPGVGVPGVGVPGVGVPGVGVPGVGVPGVGVPGVGVPGVGVPGVGVPGVGVPGVGVPGVGVPGVGVPGVGVPGVGVPGVGVPGVGVPGVGVPGVGVPGVGVPGVGVPGVGVPGVGVPGVGVPGVGVPGVGVPGVGVPGVGVPGVGVPGVGVPGVGVPGVGVPGVGVPGVGVPGVGVPGVGVPGVGVPGVGVPGVGVPGVGVPGVGVPGVGVPGVGVPGVGVPGVGVPGVGVPGVGVPGVGVPGVGVPGVGVPGVGVPGVGVPGVGVPGVGVPGVGVPGVGVPGVGVPGVGVPGVGVPGVGVPGVGVPGVGVPGVGVPGVGVPGVGVPGVGVPGVGVPGVGVPGVGVPGVGVPGVGVPGVGVPGVGVPGVGVPGVGVPGVGVPGVGVPGVGVPGVGVPGVGVPGVGVPGVGVPGVGVPGVGVPGVGVPGVGVPGVGVPGVGVPGVGVPGVGVPGVGVPGVGVPGVGVPGVGVPGVGVPGVGVPGVGVPGVGVPGVGVPGVGVPGVGVPGVGVPGVGVPGVGVPGVGVPGVGVPGVGVPGVGVPGVGVPGVGVPGVGVPGVGVPGVGVPGVGVPGVGVPGVGVPGVGVPGVGVPGVGVPGVGVPGVGVPGVGVPGVGVPGVGVPGVGVPGVGVPGVGVPGVGVPGVGVPGVGVPGVGVPGVGVPGVGVPGVGVPGVGVPGVGVPGVGVPGVGVPGVGVPGVGVPGVGVPGVGVPGVGVPGVGVPGVGVPGVGVPGVGVPGVGVPGVGVPGVGVPGVGVPGVGVPGVGVPGVGVPGVGVPGVGVPGVGVPGVGVPGVGVPGVGVPGVGVPGVGVPGVGVPGVGVPGVGVPGVGVPGVGVPGVGVPGVGVPGVGVPGVGVPGVGVPGVGVPGVGVPGVGVPGVGVPGVGVPGVGVPGVGVPGVGVPGVGVPGVGVPGVGVPGVGVPGVGVPGVGVPGVGVPGVGVPGVGVPGVGVPGVGVPGVGVPGVGVPGVGVPGVGVPGVGVPGVGVPGVGVPGVGVPGVGVPGVGVPGVGVPGVGVPGVGVPGVGVPGVGVPGVGVPGVGVPGVGVPGVGVPGVGVPGVGVPGVGVPGVGVPGVGVPGVGVPGVGVPGVGVPGVGVPGVGVPGVGVPGVGVPGVGVPGVGVPGVGVPGVGVPGVGVPGVGVPGVGVPGVGVPGVGVPGVGVPGVGVPGVGVPGVGVPGVGVPGVGVPGVGVPGVGVPGVGVPGVGVPGVGVPGVGVPGVGVPGVGVPGVGVPGVGVPGVGVPGVGVPGVGVPGVGVPGVGVPGVGVPGVGVPGVGVPGVGVPGVGVPGVGVPGVGVPGVGVPGVGVPGVGVPGVGVPGVGVPGVGVPGVGVPGVGVPGVGVPGVGVPGVGVPGVGVPGVGVPGVGVPGVGVPGVGVPGVGVPGVGVPGVGVPGVGVPGVGVPGVGVPGVGVPGVGVPGVGVPGVGVPGVGVPGVGVPGVGVPGVGVPGVGVPGVGVPGVGVPGVGVPGVGVPGVGVPGVGVPGVGVPGVGVPGVGVPGVGVPGVGVPGVGVPGVGVPGVGVPGVGVPGVGVPGVGVPGVGVPGVGVPGVGVPGVGVPGVGVPGVGVPGVGVPGVGVPGVGVPGVGVPGVGVPGVGVPGVGVPGVGVPGVGVPGVGVPGVGVPGVGVPGVGVPGVGVP

SEQ ID NO: 12 - protein, 625 aa, Artificial Sequence
  elastin-like polypeptide
  MISC_FEATURE (101)..(625): May be present or absent in groups of the repeat unit Gly Val Gly Val Pro Gly Leu Gly Val Pro Gly Val Gly Val Pro Gly Leu Gly Val Pro Gly Val Gly Val Pro
GVGVPGLGVPGVGVPGLGVPGVGVPGVGVPGLGVPGVGVPGLGVPGVGVPGVGVPGLGVPGVGVPGLGVPGVGVPGVGVPGLGVPGVGVPGLGVPGVGVPGVGVPGLGVPGVGVPGLGVPGVGVPGVGVPGLGVPGVGVPGLGVPGVGVPGVGVPGLGVPGVGVPGLGVPGVGVPGVGVPGLGVPGVGVPGLGVPGVGVPGVGVPGLGVPGVGVPGLGVPGVGVPGVGVPGLGVPGVGVPGLGVPGVGVPGVGVPGLGVPGVGVPGLGVPGVGVPGVGVPGLGVPGVGVPGLGVPGVGVPGVGVPGLGVPGVGVPGLGVPGVGVPGVGVPGLGVPGVGVPGLGVPGVGVPGVGVPGLGVPGVGVPGLGVPGVGVPGVGVPGLGVPGVGVPGLGVPGVGVPGVGVPGLGVPGVGVPGLGVPGVGVPGVGVPGLGVPGVGVPGLGVPGVGVPGVGVPGLGVPGVGVPGLGVPGVGVPGVGVPGLGVPGVGVPGLGVPGVGVPGVGVPGLGVPGVGVPGLGVPGVGVPGVGVPGLGVPGVGVPGLGVPGVGVPGVGVPGLGVPGVGVPGLGVPGVGVPGVGVPGLGVPGVGVPGLGVPGVGVPGVGVPGLGVPGVGVPGLGVPGVGVP

SEQ ID NO: 13 - protein, 625 aa, Artificial Sequence
  elastin-like polypeptide
  MISC_FEATURE (101)..(625): May be present or absent in groups of the repeat unit Gly Val Gly Val Pro Gly Val Gly Val Pro Gly Ala Gly Val Pro Gly Val Gly Val Pro Gly Val Gly Val Pro
GVGVPGVGVPGAGVPGVGVPGVGVPGVGVPGVGVPGAGVPGVGVPGVGVPGVGVPGVGVPGAGVPGVGVPGVGVPGVGVPGVGVPGAGVPGVGVPGVGVPGVGVPGVGVPGAGVPGVGVPGVGVPGVGVPGVGVPGAGVPGVGVPGVGVPGVGVPGVGVPGAGVPGVGVPGVGVPGVGVPGVGVPGAGVPGVGVPGVGVPGVGVPGVGVPGAGVPGVGVPGVGVPGVGVPGVGVPGAGVPGVGVPGVGVPGVGVPGVGVPGAGVPGVGVPGVGVPGVGVPGVGVPGAGVPGVGVPGVGVPGVGVPGVGVPGAGVPGVGVPGVGVPGVGVPGVGVPGAGVPGVGVPGVGVPGVGVPGVGVPGAGVPGVGVPGVGVPGVGVPGVGVPGAGVPGVGVPGVGVPGVGVPGVGVPGAGVPGVGVPGVGVPGVGVPGVGVPGAGVPGVGVPGVGVPGVGVPGVGVPGAGVPGVGVPGVGVPGVGVPGVGVPGAGVPGVGVPGVGVPGVGVPGVGVPGAGVPGVGVPGVGVPGVGVPGVGVPGAGVPGVGVPGVGVPGVGVPGVGVPGAGVPGVGVPGVGVPGVGVPGVGVPGAGVPGVGVPGVGVPGVGVPGVGVPGAGVPGVGVPGVGVP

SEQ ID NO: 14 - protein, 625 aa, Artificial Sequence
  elastin-like polypeptide
  MISC_FEATURE (101)..(625): May be present or absent in groups of the repeat unit Gly Val Gly Val Pro Gly Trp Gly Val Pro Gly Val Gly Val Pro Gly Trp Gly Val Pro Gly Val Gly Val Pro
GVGVPGWGVPGVGVPGWGVPGVGVPGVGVPGWGVPGVGVPGWGVPGVGVPGVGVPGWGVPGVGVPGWGVPGVGVPGVGVPGWGVPGVGVPGWGVPGVGVPGVGVPGWGVPGVGVPGWGVPGVGVPGVGVPGWGVPGVGVPGWGVPGVGVPGVGVPGWGVPGVGVPGWGVPGVGVPGVGVPGWGVPGVGVPGWGVPGVGVPGVGVPGWGVPGVGVPGWGVPGVGVPGVGVPGWGVPGVGVPGWGVPGVGVPGVGVPGWGVPGVGVPGWGVPGVGVPGVGVPGWGVPGVGVPGWGVPGVGVPGVGVPGWGVPGVGVPGWGVPGVGVPGVGVPGWGVPGVGVPGWGVPGVGVPGVGVPGWGVPGVGVPGWGVPGVGVPGVGVPGWGVPGVGVPGWGVPGVGVPGVGVPGWGVPGVGVPGWGVPGVGVPGVGVPGWGVPGVGVPGWGVPGVGVPGVGVPGWGVPGVGVPGWGVPGVGVPGVGVPGWGVPGVGVPGWGVPGVGVPGVGVPGWGVPGVGVPGWGVPGVGVPGVGVPGWGVPGVGVPGWGVPGVGVPGVGVPGWGVPGVGVPGWGVPGVGVPGVGVPGWGVPGVGVPGWGVPGVGVPGVGVPGWGVPGVGVPGWGVPGVGVP

SEQ ID NO: 15 - protein, 1125 aa, Artificial Sequence
  elastin-like polypeptide
  MISC_FEATURE (181)..(1125): May be present or absent in groups of the repeat unit Gly Val Gly Val Pro Gly Val Gly Val Pro Gly Val Gly Val Pro Gly Val Gly Val Pro Gly Val Gly Val Pro Gly Val Gly Val Pro Gly Glu Gly Val Pro Gly Phe Gly Val Pro Gly Val Gly Val Pro
GVGVPGVGVPGVGVPGVGVPGVGVPGVGVPGEGVPGFGVPGVGVPGVGVPGVGVPGVGVPGVGVPGVGVPGVGVPGEGVPGFGVPGVGVPGVGVPGVGVPGVGVPGVGVPGVGVPGVGVPGEGVPGFGVPGVGVPGVGVPGVGVPGVGVPGVGVPGVGVPGVGVPGEGVPGFGVPGVGVPGVGVPGVGVPGVGVPGVGVPGVGVPGVGVPGEGVPGFGVPGVGVPGVGVPGVGVPGVGVPGVGVPGVGVPGVGVPGEGVPGFGVPGVGVPGVGVPGVGVPGVGVPGVGVPGVGVPGVGVPGEGVPGFGVPGVGVPGVGVPGVGVPGVGVPGVGVPGVGVPGVGVPGEGVPGFGVPGVGVPGVGVPGVGVPGVGVPGVGVPGVGVPGVGVPGEGVPGFGVPGVGVPGVGVPGVGVPGVGVPGVGVPGVGVPGVGVPGEGVPGFGVPGVGVPGVGVPGVGVPGVGVPGVGVPGVGVPGVGVPGEGVPGFGVPGVGVPGVGVPGVGVPGVGVPGVGVPGVGVPGVGVPGEGVPGFGVPGVGVPGVGVPGVGVPGVGVPGVGVPGVGVPGVGVPGEGVPGFGVPGVGVPGVGVPGVGVPGVGVPGVGVPGVGVPGVGVPGEGVPGFGVPGVGVPGVGVPGVGVPGVGVPGVGVPGVGVPGVGVPGEGVPGFGVPGVGVPGVGVPGVGVPGVGVPGVGVPGVGVPGVGVPGEGVPGFGVPGVGVPGVGVPGVGVPGVGVPGVGVPGVGVPGVGVPGEGVPGFGVPGVGVPGVGVPGVGVPGVGVPGVGVPGVGVPGVGVPGEGVPGFGVPGVGVPGVGVPGVGVPGVGVPGVGVPGVGVPGVGVPGEGVPGFGVPGVGVPGVGVPGVGVPGVGVPGVGVPGVGVPGVGVPGEGVPGFGVPGVGVPGVGVPGVGVPGVGVPGVGVPGVGVPGVGVPGEGVPGFGVPGVGVPGVGVPGVGVPGVGVPGVGVPGVGVPGVGVPGEGVPGFGVPGVGVPGVGVPGVGVPGVGVPGVGVPGVGVPGVGVPGEGVPGFGVPGVGVPGVGVPGVGVPGVGVPGVGVPGVGVPGVGVPGEGVPGFGVPGVGVPGVGVPGVGVPGVGVPGVGVPGVGVPGVGVPGEGVPGFGVPGVGVP

SEQ ID NO: 16 - protein, 1125 aa, Artificial Sequence
  elastin-like polypeptide
  MISC_FEATURE (181)..(1125): May be present or absent in groups of the repeat unit Gly Val Gly Val Pro Gly Val Gly Val Pro Gly Val Gly Val Pro Gly Val Gly Val Pro Gly Val Gly Val Pro Gly Val Gly Val Pro Gly Lys Gly Val Pro Gly Phe Gly Val Pro Gly Val Gly Val Pro
GVGVPGVGVPGVGVPGVGVPGVGVPGVGVPGKGVPGFGVPGVGVPGVGVPGVGVPGVGVPGVGVPGVGVPGVGVPGKGVPGFGVPGVGVPGVGVPGVGVPGVGVPGVGVPGVGVPGVGVPGKGVPGFGVPGVGVPGVGVPGVGVPGVGVPGVGVPGVGVPGVGVPGKGVPGFGVPGVGVPGVGVPGVGVPGVGVPGVGVPGVGVPGVGVPGKGVPGFGVPGVGVPGVGVPGVGVPGVGVPGVGVPGVGVPGVGVPGKGVPGFGVPGVGVPGVGVPGVGVPGVGVPGVGVPGVGVPGVGVPGKGVPGFGVPGVGVPGVGVPGVGVPGVGVPGVGVPGVGVPGVGVPGKGVPGFGVPGVGVPGVGVPGVGVPGVGVPGVGVPGVGVPGVGVPGKGVPGFGVPGVGVPGVGVPGVGVPGVGVPGVGVPGVGVPGVGVPGKGVPGFGVPGVGVPGVGVPGVGVPGVGVPGVGVPGVGVPGVGVPGKGVPGFGVPGVGVPGVGVPGVGVPGVGVPGVGVPGVGVPGVGVPGKGVPGFGVPGVGVPGVGVPGVGVPGVGVPGVGVPGVGVPGVGVPGKGVPGFGVPGVGVPGVGVPGVGVPGVGVPGVGVPGVGVPGVGVPGKGVPGFGVPGVGVPGVGVPGVGVPGVGVPGVGVPGVGVPGVGVPGKGVPGFGVPGVGVPGVGVPGVGVPGVGVPGVGVPGVGVPGVGVPGKGVPGFGVPGVGVPGVGVPGVGVPGVGVPGVGVPGVGVPGVGVPGKGVPGFGVPGVGVPGVGVPGVGVPGVGVPGVGVPGVGVPGVGVPGKGVPGFGVPGVGVPGVGVPGVGVPGVGVPGVGVPGVGVPGVGVPGKGVPGFGVPGVGVPGVGVPGVGVPGVGVPGVGVPGVGVPGVGVPGKGVPGFGVPGVGVPGVGVPGVGVPGVGVPGVGVPGVGVPGVGVPGKGVPGFGVPGVGVPGVGVPGVGVPGVGVPGVGVPGVGVPGVGVPGKGVPGFGVPGVGVPGVGVPGVGVPGVGVPGVGVPGVGVPGVGVPGKGVPGFGVPGVGVPGVGVPGVGVPGVGVPGVGVPGVGVPGVGVPGKGVPGFGVPGVGVPGVGVPGVGVPGVGVPGVGVPGVGVPGVGVPGKGVPGFGVPGVGVP

SEQ ID NO: 17 - protein, 625 aa, Artificial Sequence
  elastin-like polypeptide
  MISC_FEATURE (26)..(625): May be present or absent in groups of the repeat unit Gly Ala Gly Val Pro Gly Val Gly Val Pro Gly Ala Gly Val Pro Gly Val Gly Val Pro Gly Ala Gly Val Pro
GAGVPGVGVPGAGVPGVGVPGAGVPGAGVPGVGVPGAGVPGVGVPGAGVPGAGVPGVGVPGAGVPGVGVPGAGVPGAGVPGVGVPGAGVPGVGVPGAGVPGAGVPGVGVPGAGVPGVGVPGAGVPGAGVPGVGVPGAGVPGVGVPGAGVPGAGVPGVGVPGAGVPGVGVPGAGVPGAGVPGVGVPGAGVPGVGVPGAGVPGAGVPGVGVPGAGVPGVGVPGAGVPGAGVPGVGVPGAGVPGVGVPGAGVPGAGVPGVGVPGAGVPGVGVPGAGVPGAGVPGVGVPGAGVPGVGVPGAGVPGAGVPGVGVPGAGVPGVGVPGAGVPGAGVPGVGVPGAGVPGVGVPGAGVPGAGVPGVGVPGAGVPGVGVPGAGVPGAGVPGVGVPGAGVPGVGVPGAGVPGAGVPGVGVPGAGVPGVGVPGAGVPGAGVPGVGVPGAGVPGVGVPGAGVPGAGVPGVGVPGAGVPGVGVPGAGVPGAGVPGVGVPGAGVPGVGVPGAGVPGAGVPGVGVPGAGVPGVGVPGAGVPGAGVPGVGVPGAGVPGVGVPGAGVPGAGVPGVGVPGAGVPGVGVPGAGVPGAGVPGVGVPGAGVPGVGVPGAGVPGAGVPGVGVPGAGVPGVGVPGAGVP

SEQ ID NO: 18 - protein, 100 aa, Artificial Sequence
  Linker peptide
  MISC_FEATURE (6)..(100): May be present or absent in groups of the repeat unit Glu Ala Ala Ala Lys
EAAAKEAAAKEAAAKEAAAKEAAAKEAAAKEAAAKEAAAKEAAAKEAAAKEAAAKEAAAKEAAAKEAAAKEAAAKEAAAKEAAAKEAAAKEAAAKEAAAK

SEQ ID NO: 19 - protein, 150 aa, Artificial Sequence
  Linker peptide
  MISC_FEATURE (6)..(150): May be present or absent in groups of the repeat unit Gly Gly Gly Gly Ser
GGGGSGGGGSGGGGSGGGGSGGGGSGGGGSGGGGSGGGGSGGGGSGGGGSGGGGSGGGGSGGGGSGGGGSGGGGSGGGGSGGGGSGGGGSGGGGSGGGGSGGGGSGGGGSGGGGSGGGGSGGGGSGGGGSGGGGSGGGGSGGGGSGGGGS

SEQ ID NO: 20 - protein, 200 aa, Artificial Sequence
  Linker peptide
  MISC_FEATURE (5)..(100): May be present or absent in groups of the repeat unit Ser Gly Gly Gly
SGGGSGGGSGGGSGGGSGGGSGGGSGGGSGGGSGGGSGGGSGGGSGGGSGGGSGGGSGGGSGGGSGGGSGGGSGGGSGGGSGGGSGGGSGGGSGGGSGGGSGGGSGGGSGGGSGGGSGGGSGGGSGGGSGGGSGGGSGGGSGGGSGGGSGGGSGGGSGGGSGGGSGGGSGGGSGGGSGGGSGGGSGGGSGGGSGGGSGGG

SEQ ID NO: 21 - protein, 80 aa, Artificial Sequence
  Linker peptide
  MISC_FEATURE (6)..(100): May be present or absent in groups of the repeat unit Gly Gly Gly Ser
GGGSGGGSGGGSGGGSGGGSGGGSGGGSGGGSGGGSGGGSGGGSGGGSGGGSGGGSGGGSGGGSGGGSGGGSGGGSGGGS

SEQ ID NO: 22 - protein, 18 aa, Artificial Sequence
  Linker peptide
KESGSVSSEQLAQFRSLD

SEQ ID NO: 23 - protein, 14 aa, Artificial Sequence
  Linker peptide
EGKSSGSGSESKST

SEQ ID NO: 24 - protein, 185 aa, Artificial Sequence
  AdPep
  MISC_FEATURE (25)..(47): May be present or absent
  MISC_FEATURE (48)..(70): May be present or absent
  MISC_FEATURE (71)..(93): May be present or absent
  MISC_FEATURE (94)..(116): May be present or absent
  MISC_FEATURE (117)..(139): May be present or absent
  MISC_FEATURE (140)..(162): May be present or absent
  MISC_FEATURE (163)..(185): May be present or absent
MRAIVFRVQWLRRYFVNGSRSGGGRAIVFRVQWLRRYFVNGSRSGGGRAIVFRVQWLRRYFVNGSRSGGGRAIVFRVQWLRRYFVNGSRSGGGRAIVFRVQWLRRYFVNGSRSGGGRAIVFRVQWLRRYFVNGSRSGGGRAIVFRVQWLRRYFVNGSRSGGGRAIVFRVQWLRRYFVNGSRSGGG

SEQ ID NO: 25 - protein, 184 aa, Artificial Sequence
  AdPep
  MISC_FEATURE (24)..(46): May be present or absent
  MISC_FEATURE (47)..(69): May be present or absent
  MISC_FEATURE (70)..(92): May be present or absent
  MISC_FEATURE (93)..(115): May be present or absent
  MISC_FEATURE (116)..(138): May be present or absent
  MISC_FEATURE (139)..(161): May be present or absent
  MISC_FEATURE (162)..(184): May be present or absent
RAIVFRVQWLRRYFVNGSRSGGGRAIVFRVQWLRRYFVNGSRSGGGRAIVFRVQWLRRYFVNGSRSGGGRAIVFRVQWLRRYFVNGSRSGGGRAIVFRVQWLRRYFVNGSRSGGGRAIVFRVQWLRRYFVNGSRSGGGRAIVFRVQWLRRYFVNGSRSGGGRAIVFRVQWLRRYFVNGSRSGGG

SEQ ID NO: 26 - protein, 2477 aa, Homo sapiens
MLRGPGPGLLLLAVQCLGTAVPSTGASKSKRQAQQMVQPQSPVAVSQSKPGCYDNGKHYQINQQWERTYLGNALVCTCYGGSRGFNCESKPEAEETCFDKYTGNTYRVGDTYERPKDSMIWDCTCIGAGRGRISCTIANRCHEGGQSYKIGDTWRRPHETGGYMLECVCLGNGKGEWTCKPIAEKCFDHAAGTSYVVGETWEKPYQGWMMVDCTCLGEGSGRITCTSRNRCNDQDTRTSYRIGDTWSKKDNRGNLLQCICTGNGRGEWKCERHTSVQTTSSGSGPFTDVRAAVYQPQPHPQPPPYGHCVTDSGVVYSVGMQWLKTQGNKQMLCTCLGNGVSCQETAVTQTYGGNSNGEPCVLPFTYNGRTFYSCTTEGRQDGHLWCSTTSNYEQDQKYSFCTDHTVLVQTRGGNSNGALCHFPFLYNNHNYTDCTSEGRRDNMKWCGTTQNYDADQKFGFCPMAAHEEICTTNEGVMYRIGDQWDKQHDMGHMMRCTCVGNGRGEWTCIAYSQLRDQCIVDDITYNVNDTFHKRHEEGHMLNCTCFGQGRGRWKCDPVDQCQDSETGTFYQIGDSWEKYVHGVRYQCYCYGRGIGEWHCQPLQTYPSSSGPVEVFITETPSQPNSHPIQWNAPQPSHISKYILRWRPKNSVGRWKEATIPGHLNSYTIKGLKPGVVYEGQLISIQQYGHQEVTRFDFTTTSTSTPVTSNTVTGETTPFSPLVATSESVTEITASSFVVSWVSASDTVSGFRVEYELSEEGDEPQYLDLPSTATSVNIPDLLPGRKYIVNVYQISEDGEQSLILSTSQTTAPDAPPDTTVDQVDDTSIVVRWSRPQAPITGYRIVYSPSVEGSSTELNLPETANSVTLSDLQPGVQYNITIYAVEENQESTPVVIQQETTGTPRSDTVPSPRDLQFVEVTDVKVTIMWTPPESAVTGYRVDVIPVNLPGEHGQRLPISRNTFAEVTGLSPGVTYYFKVFAVSHGRESKPLTAQQTTKLDAPTNLQFVNETDSTVLVRWTPPRAQITGYRLTVGLTRRGQPRQYNVGPSVSKYPLRNLQPASEYTVSLVAIKGNQESPKATGVFTTLQPGSSIPPYNTEVTETTIVITWTPAPRIGFKLGVRPSQGGEAPREVTSDSGSIVVSGLTPGVEYVYTIQVLRDGQERDAPIVNKVVTPLSPPTNLHLEANPDTGVLTVSWERSTTPDITGYRITTTPTNGQQGNSLEEVVHADQSSCTFDNLSPGLEYNVSVYTVKDDKESVPISDTIIPEVPQLTDLSFVDITDSSIGLRWTPLNSSTIIGYRITVVAAGEGIPIFEDFVDSSVGYYTVTGLEPGIDYDISVITLINGGESAPTTLTQQTAVPPPTDLRFTNIGPDTMRVTWAPPPSIDLTNFLVRYSPVKNEEDVAELSISPSDNAVVLTNLLPGTEYVVSVSSVYEQHESTPLRGRQKTGLDSPTGIDFSDITANSFTVHWIAPRATITGYRIRHHPEHFSGRPREDRVPHSRNSITLTNLTPGTEYVVSIVALNGREESPLLIGQQSTVSDVPRDLEVVAATPTSLLISWDAPAVTVRYYRITYGETGGNSPVQEFTVPGSKSTATISGLKPGVDYTITVYAVTGRGDSPASSKPISINYRTEIDKPSQMQVTDVQDNSISVKWLPSSSPVTGYRVTTTPKNGPGPTKTKTAGPDQTEMTIEGLQPTVEYVVSVYAQNPSGESQPLVQTAVTNIDRPKGLAFTDVDVDSIKIAWESPQGQVSRYRVTYSSPEDGIHELFPAPDGEEDTAELQGLRPGSEYTVSVVALHDDMESQPLIGTQSTAIPAPTDLKFTQVTPTSLSAQWTPPNVQLTGYRVRVTPKEKTGPMKEINLAPDSSSVVVSGLMVATKYEVSVYALKDTLTSRPAQGVVTTLENVSPPRRARVTDATETTITISWRTKTETITGFQVDAVPANGQTPIQRTIKPDVRSYTITGLQPGTDYKIYLYTLNDNARSSPVVIDASTAIDAPSNLRFLATTPNSLLVSWQPPRARITGYIIKYEKPGSPPREVVPRPRPGVTEATITGLEPGTEYTIYVIALKNNQKSEPLIGRKKTDELPQLVTLPHPNLHGPEILDVPSTVQKTPFVTHPGYDTGNGIQLPGTSGQQPSVGQQMIFEEHGFRRTTPPTTATPIRHRPRPYPPNVGEEIQIGHIPREDVDYHLYPHGPGLNPNASTGQEALSQTTISWAPFQDTSEYIISCHPVGTDEEPLQFRVPGTSTSATLTGLTRGATYNVIVEALKDQQRHKVREEVVTVGNSVNEGLNQPTDDSCFDPYTVSHYAVGDEWERMSESGFKLLCQCLGFGSGHFRCDSSRWCHDNGVNYKIGEKWDRQGENGQMMSCTCLGNGKGEFKCDPHEATCYDDGKTYHVGEQWQKEYLGAICSCTCFGGQRGWRCDNCRRPGGEPSPEGTTGQSYNQYSQRYHQRTNTNVNCPIECFMPLDVQADREDSRE

SEQ ID NO: 27 - protein, 1273 aa, Betacoronavirus Severe acute respiratory syndrome coronavirus 2
MFVFLVLLPLVSSQCVNLTTRTQLPPAYTNSFTRGVYYPDKVFRSSVLHSTQDLFLPFFSNVTWFHAIHVSGTNGTKRFDNPVLPFNDGVYFASTEKSNIIRGWIFGTTLDSKTQSLLIVNNATNVVIKVCEFQFCNDPFLGVYYHKNNKSWMESEFRVYSSANNCTFEYVSQPFLMDLEGKQGNFKNLREFVFKNIDGYFKIYSKHTPINLVRDLPQGFSALEPLVDLPIGINITRFQTLLALHRSYLTPGDSSSGWTAGAAAYYVGYLQPRTFLLKYNENGTITDAVDCALDPLSETKCTLKSFTVEKGIYQTSNFRVQPTESIVRFPNITNLCPFGEVFNATRFASVYAWNRKRISNCVADYSVLYNSASFSTFKCYGVSPTKLNDLCFTNVYADSFVIRGDEVRQIAPGQTGKIADYNYKLPDDFTGCVIAWNSNNLDSKVGGNYNYLYRLFRKSNLKPFERDISTEIYQAGSTPCNGVEGFNCYFPLQSYGFQPTNGVGYQPYRVVVLSFELLHAPATVCGPKKSTNLVKNKCVNFNFNGLTGTGVLTESNKKFLPFQQFGRDIADTTDAVRDPQTLEILDITPCSFGGVSVITPGTNTSNQVAVLYQDVNCTEVPVAIHADQLTPTWRVYSTGSNVFQTRAGCLIGAEHVNNSYECDIPIGAGICASYQTQTNSPRRARSVASQSIIAYTMSLGAENSVAYSNNSIAIPTNFTISVTTEILPVSMTKTSVDCTMYICGDSTECSNLLLQYGSFCTQLNRALTGIAVEQDKNTQEVFAQVKQIYKTPPIKDFGGFNFSQILPDPSKPSKRSFIEDLLFNKVTLADAGFIKQYGDCLGDIAARDLICAQKFNGLTVLPPLLTDEMIAQYTSALLAGTITSGWTFGAGAALQIPFAMQMAYRFNGIGVTQNVLYENQKLIANQFNSAIGKIQDSLSSTASALGKLQDVVNQNAQALNTLVKQLSSNFGAISSVLNDILSRLDKVEAEVQIDRLITGRLQSLQTYVTQQLIRAAEIRASANLAATKMSECVLGQSKRVDFCGKGYHLMSFPQSAPHGVVFLHVTYVPAQEKNFTTAPAICHDGKAHFPREGVFVSNGTHWFVTQRNFYEPQIITTDNTFVSGNCDVVIGIVNNTVYDPLQPELDSFKEELDKYFKNHTSPDVDLGDISGINASVVNIQKEIDRLNEVAKNLNESLIDLQELGKYEQYIKWPWYIWLGFIAGLIAIVMVTIMLCCMTSCCSCLKGCCSCGSCCKFDEDDSEPVLKGVKLHYT

SEQ ID NO: 28 - protein, 90 aa, Artificial Sequence
  Human PKD1
SAGESVQITLPKNEVQLNAYVLQEPPKGETYTYDWQLITHPRDYSGEMEGKHSQILKLSKLTPGLYEFKVIVEGQNAHGEGYVNVTVKPE

SEQ ID NO: 29 - protein, 90 aa, Artificial Sequence
  Human PKD2
IAIVSPQFQEISLPTTSTVIDGSQSTDDDKIVQYHWEELKGPLREEKISEDTAILKLSKLVPGNYTFSLTVVDSDGATNSTTANLTVNKA

SEQ ID NO: 30 - protein, 91 aa, Artificial Sequence
  Human PKD3
VANAGPNQVITLPQNSITLFGNQSTDDHGITSYEWSLSPSSKGKVVEMQGVRTPTLQLSAMQEGDYTYQLTVTDTIGQQATAQVTVIVQPE

SEQ ID NO: 31 - protein, 89 aa, Artificial Sequence
  Human PKD4
QADAGPDKELTLPVDSTTLDGSKSSDDQKIISYLWEKTQGPDGVQLENANSSVATVTGLQVGTYVFTLTVKDERNLQSQSSVNVIVKEE

SEQ ID NO: 32 - protein, 92 aa, Artificial Sequence
  Human PKD5
IAKITGNVVITLPTSTAELDGSKSSDDKGIVSYLWTRDEGSPAAGEVLNHSDHHPILFLSNLVEGTYTFHLKVTDAKGESDTDRTTVEVKPD

SEQ ID NO: 33 - protein, 477 aa, Homo sapiens
VSAGESVQITLPKNEVQLNAYVLQEPPKGETYTYDWQLITHPRDYSGEMEGKHSQILKLSKLTPGLYEFKVIVEGQNAHGEGYVNVTVKPEPRKNRPPIAIVSPQFQEISLPTTSTVIDGSQSTDDDKIVQYHWEELKGPLREEKISEDTAILKLSKLVPGNYTFSLTVVDSDGATNSTTANLTVNKAVDYPPVANAGPNQVITLPQNSITLFGNQSTDDHGITSYEWSLSPSSKGKVVEMQGVRTPTLQLSAMQEGDYTYQLTVTDTIGQQATAQVTVIVQPENNKPPQADAGPDKELTLPVDSTTLDGSKSSDDQKIISYLWEKTQGPDGVQLENANSSVATVTGLQVGTYVFTLTVKDERNLQSQSSVNVIVKEEINKPPIAKITGNVVITLPTSTAELDGSKSSDDKGIVSYLWTRDEGSPAAGEVLNHSDHHPILFLSNLVEGTYTFHLKVTDAKGESDTDRTTVEVKPDPR

SEQ ID NO: 34 - protein, 478 aa, Homo sapiens
MVSAGESVQITLPKNEVQLNAYVLQEPPKGETYTYDWQLITHPRDYSGEMEGKHSQILKLSKLTPGLYEFKVIVEGQNAHGEGYVNVTVKPEPRKNRPPIAIVSPQFQEISLPTTSTVIDGSQSTDDDKIVQYHWEELKGPLREEKISEDTAILKLSKLVPGNYTFSLTVVDSDGATNSTTANLTVNKAVDYPPVANAGPNQVITLPQNSITLFGNQSTDDHGITSYEWSLSPSSKGKVVEMQGVRTPTLQLSAMQEGDYTYQLTVTDTIGQQATAQVTVIVQPENNKPPQADAGPDKELTLPVDSTTLDGSKSSDDQKIISYLWEKTQGPDGVQLENANSSVATVTGLQVGTYVFTLTVKDERNLQSQSSVNVIVKEEINKPPIAKITGNVVITLPTSTAELDGSKSSDDKGIVSYLWTRDEGSPAAGEVLNHSDHHPILFLSNLVEGTYTFHLKVTDAKGESDTDRTTVEVKPDPR

SEQ ID NO: 35 - protein, 1049 aa, Homo sapiens
MEKRLGVKPNPASWILSGYYWQTSAKWLRSLYLFYTCFCFSVLWLSTDASESRCQQGKTQFGVGLRSGGENHLWLLEGTPSLQSCWAACCQDSACHVFWWLEGMCIQADCSRPQSCRAFRTHSSNSMLVFLKKFQTADDLGFLPEDDVPHLLGLGWNWASWRQSPPRAALRPAVSSSDQQSLIRKLQKRGSPSDVVTPIVTQHSKVNDSNELGGLTTSGSAEVHKAITISSPLTTDLTAELSGGPKNVSVQPEISEGLATTPSTQQVKSSEKTQIAVPQPVAPSYSYATPTPQASFQSTSAPYPVIKELVVSAGESVQITLPKNEVQLNAYVLQEPPKGETYTYDWQLITHPRDYSGEMEGKHSQILKLSKLTPGLYEFKVIVEGQNAHGEGYVNVTVKPEPRKNRPPIAIVSPQFQEISLPTTSTVIDGSQSTDDDKIVQYHWEELKGPLREEKISEDTAILKLSKLVPGNYTFSLTVVDSDGATNSTTANLTVNKAVDYPPVANAGPNQVITLPQNSITLFGNQSTDDHGITSYEWSLSPSSKGKVVEMQGVRTPTLQLSAMQEGDYTYQLTVTDTIGQQATAQVTVIVQPENNKPPQADAGPDKELTLPVDSTTLDGSKSSDDQKIISYLWEKTQGPDGVQLENANSSVATVTGLQVGTYVFTLTVKDERNLQSQSSVNVIVKEEINKPPIAKITGNVVITLPTSTAELDGSKSSDDKGIVSYLWTRDEGSPAAGEVLNHSDHHPILFLSNLVEGTYTFHLKVTDAKGESDTDRTTVEVKPDPRKNNLVEIILDINVSQLTERLKGMFIRQIGVLLGVLDSDIIVQKIQPYTEQSTKMVFFVQNEPPHQIFKGHEVAAMLKSELRKQKADFLIFRALEVNTVTCQLNCSDHGHCDSFTKRCICDPFWMENFIKVQLRDGDSNCEWSVLYVIIATFVIVVALGILSWTVICCCKRQKGKPKRKSKYKILDATDQESLELKPTSRAGIKQKGLLLSSSLMHSESELDSDDAIFTWPDREKGKLLHGQNGSVPNGQTPLKARSPREEIL

SEQ ID NO: 36 - protein, 1048 aa, Mus musculus
MEKRLGVKPSPASWVLPGYCWQTSVKLPRSLYLLYSFFCFSVLWLSTDADESRCQQGKTLYGAGLRTEGENHLRLLAGSLPFHACRAACCRDSACHALWWLEGMCFQADCSKPQSCQPFRTDSSNSMLIIFQKSQTTDDLGLLPEDDEPHLLRLGWGRTSWRRQSLLGAPLTLSVPSSHHQSLLRDRQKRDLSVVPTHGAMQHSKVNHSEEAGALSPTSAEVRKTITVAGSFTSNHTTQTPEWPKNVSIHPEPSEHSSPVSGTPQVKSTEHSPTDAPLPVAPSYSYATPTPQASSQSTSAPHPVVKELVVSAGKSVQITLPKNEVQLNAFVLPEAEPGETYTYDWQLITHPTDYSGEVERKHSQSLQLSKLTPGLYEFKVTVDGQNAHGEGYVNVTVKPEPRKNRPPVAVVSPQFQEISLPTTSTIIDGSQSTDDDKIVQYHWEELKGPLREEKISEDTAILKLSKLVPGNYTFSLTVVDSDGATNSTTASLTVNKAVDYPPVANAGPNQVITLPQNSITLFGNQSTDDHGITSYEWSLSPSSKGKVVEMQGVRTPALQLSAMQEGDYTYQLTVTDTAGQQATAQVTVIVQPENNKPPQADAGPDKELTLPVDSTTLDGSKSTDDQRVVSYLWEQSRGPDGVQLENANSSVATVTGLQVGTYVFTLTVKDERNLQSQSSVNVIVKEEINKPPVAKIAGNVVVTLPTSTAELDGSRSSDDKGIVSYLWTRDETSPAAGEVLNHSDHHPVLFLSNLVEGTYTFHLKVTDAKGESDTDRTTVEVKPDPRKSNLVEIILDVNVSQLTERLKGMLIRQIGVLLGVLDSDIIVQKIQPYTEQSTKMLFFVQNDPPHQLFKGHEVAAMLKSELQKQKADFLIFRALEISTVTCQLNCSDHGHCDSFTKRCVCDPFWMENFIKVQLRDGDSNCEWSVLYVIIASFVIVVALGILSWTTICCCKRQKGKPKRKSRYKILDATDQESLELKPTSRAGSKQKGPTLSSSLMHSESELDSDDAIFTWPDREKGKLLYGQNGSVPNGQTPLKSRSAREEIL

SEQ ID NO: 37 - protein, 92 aa, Artificial Sequence
  Mouse PKD1
VVSAGKSVQITLPKNEVQLNAFVLPEAEPGETYTYDWQLITHPTDYSGEVERKHSQSLQLSKLTPGLYEFKVTVDGQNAHGEGYVNVTVKPE

SEQ ID NO: 38 - protein, 90 aa, Artificial Sequence
  Mouse PKD2
VAVVSPQFQEISLPTTSTIIDGSQSTDDDKIVQYHWEELKGPLREEKISEDTAILKLSKLVPGNYTFSLTVVDSDGATNSTTASLTVNKA

SEQ ID NO: 39 - protein, 91 aa, Artificial Sequence
  Mouse PKD3
VANAGPNQVITLPQNSITLFGNQSTDDHGITSYEWSLSPSSKGKVVEMQGVRTPALQLSAMQEGDYTYQLTVTDTAGQQATAQVTVIVQPE

SEQ ID NO: 40 - protein, 89 aa, Artificial Sequence
  Mouse PKD4
QADAGPDKELTLPVDSTTLDGSKSTDDQRVVSYLWEQSRGPDGVQLENANSSVATVTGLQVGTYVFTLTVKDERNLQSQSSVNVIVKEE

SEQ ID NO: 41 - protein, 92 aa, Artificial Sequence
  Mouse PKD5
VAKIAGNVVVTLPTSTAELDGSRSSDDKGIVSYLWTRDETSPAAGEVLNHSDHHPVLFLSNLVEGTYTFHLKVTDAKGESDTDRTTVEVKPD

SEQ ID NO: 42 - protein, 1049 aa, Unknown
  Pongo sp.
MEKRLGVKPNPASWILSGYYWQTSAKWLRTLYLFYTCFCFSVLWLSTDASESRCQQGKTQFGVGLRSGGENHLWLLEGTPSLQSCWAACCQDSACHVFWWLEGMCIQADCSRPQSCRAFRTHSSNSMLMFLKKFQTADDLGFLPEDDVPHLLGLGWNWASWRQSPPRAALRPAVSSSDQQSLIRKLQKRGSPSEVVTPIVTQHSKVNDSNELGGLTTSGSAEVHKAITISSPLTTDLTAELPGGPKNVSAQPEIPEGLATTPSTQQVKSSEKTQIAVPQPVAPSYSYGTPTPQASFQSTSAPYPVIKELVVSAGDSVQITLPKNEVQLNAYVLQEPPKGETYTYDWQLITHPRDYSGEMEGKHSQILKLSKLTPGLYEFKVIVEGQNAHGEGYVNVTVKPEPRKNRPPIAIVSPQFQEISLPTTSTVIDGSQSTDDDKIVQYHWEELKGPLREEKISEDTAILKLSKLVPGNYTFSLTVVDSDGATNSTTANLTVNKAVDYPPVANAGPNQVITLPQNSITLFGNQSTDDHGITSYEWSLSPSSKGKVVEMQGVRTPTLQLSAMQEGDYTYQLTVTDTIGQQATAQVTVIVQPENNKPPQADAGPDKELTLPVDSTTLDGSKSSDDQKIISYLWEKTQGPDGVQLENANSSIATVTGLQVGTYVFTLTVKDERNLQSQSSVNVIVKEEINKPPIAKITGNVVITLPTSTAELDGSKSSDDKGIVSYLWTRDEGSPAAGEVLNHSDHHPILFLSNLVEGTYTFHLKVTDAKGESDTDRTTVEVKPDPRKNNLVEIILDINVSQLTERLKGMFIRQIGVLLGVLDSDIIVQKIQPYTEQSTKMVFFVQNEPPHQIFKGHEVAAMLKSELRKQKADFLIFRALEINTVTCQLNCSDHGHCDSFTKRCICDPFWMENFIKVQLRDGESNCEWSVLYVIIATFVIVVALGILSWTVICCCKRQKGKPKRKSKYKILDATDQESLELKPTSRTGIKQKGLVLSSSLMHSESELDSDDAIFTWPDREKGKLLHGQNGSVPNGQTPLKARSPREEIL

SEQ ID NO: 43 - protein, 92 aa, Artificial Sequence
  Orangutan PKD1
VVSAGDSVQITLPKNEVQLNAYVLQEPPKGETYTYDWQLITHPRDYSGEMEGKHSQILKLSKLTPGLYEFKVIVEGQNAHGEGYVNVTVKPE

SEQ ID NO: 44 - protein, 90 aa, Artificial Sequence; identical to SEQ ID NO: 29
  Orangutan PKD2

SEQ ID NO: 45 - protein, 91 aa, Artificial Sequence; identical to SEQ ID NO: 30
  Orangutan PKD3

SEQ ID NO: 46 - protein, 89 aa, Artificial Sequence
  Orangutan PKD4
QADAGPDKELTLPVDSTTLDGSKSSDDQKIISYLWEKTQGPDGVQLENANSSIATVTGLQVGTYVFTLTVKDERNLQSQSSVNVIVKEE

SEQ ID NO: 47 - protein, 92 aa, Artificial Sequence; identical to SEQ ID NO: 32
  Orangutan PKD5

SEQ ID NO: 48 - protein, 30 aa, Artificial Sequence
  Linker peptide
  MISC_FEATURE (2)..(30): Each individual Gly may be present or absent
GGGGGGGGGGGGGGGGGGGGGGGGGGGGGG

SEQ ID NO: 49 - protein, 79 aa, Artificial Sequence
  Human MANEC (motif at N terminus with eight cysteines)
ASESRCQQGKTQFGVGLRSGGENHLWLLEGTPSLQSCWAACCQDSACHVFWWLEGMCIQADCSRPQSCRAFRTHSSNSM

SEQ ID NO: 50 - protein, 79 aa, Artificial Sequence
  Mouse MANEC (motif at N terminus with eight cysteines)
ADESRCQQGKTLYGAGLRTEGENHLRLLAGSLPFHACRAACCRDSACHALWWLEGMCFQADCSKPQSCQPFRTDSSNSM

SEQ ID NO: 51 - protein, 79 aa, Artificial Sequence; identical to SEQ ID NO: 49
  Orangutan MANEC (motif at N terminus with eight cysteines)

SEQ ID NO: 52 - protein, 100 aa, Artificial Sequence
  Recombinant PKD2
GNRPPIAIVSPQFQEISLPTTSTVIDGSQSTDDDKIVQYHWEELKGPLREEKISEDTAILKLSKLVPGNYTFSLTVVDSDGATNSTTANLTVNKAVDYPG

SEQ ID NO: 53 - protein, 100 aa, Artificial Sequence
  Recombinant PKD2
GNRPPIAIVSPQFQEISLPTTSTVIDGHQSTDDDKIVQYHWEELKGPLREEKISEDTAILKLSKLVPGNYTFSLTVVDSDGATNSTTANLTVNKAVDYPG

SEQ ID NO: 54 - protein, 100 aa, Artificial Sequence
  Recombinant PKD2
GNRPPIAIVSPQFQEISLPTTSTVIDGSHSTDDDKIVQYHWEELKGPLREEKISEDTAILKLSKLVPGNYTFSLTVVDSDGATNSTTANLTVNKAVDYPG

SEQ ID NO: 55 - protein, 100 aa, Artificial Sequence
  Recombinant PKD2
GNRPPIAIVSPQFQEISLPTTSTVIDGSQSHDDDKIVQYHWEELKGPLREEKISEDTAILKLSKLVPGNYTFSLTVVDSDGATNSTTANLTVNKAVDYPG

SEQ ID NO: 56 - protein, 100 aa, Artificial Sequence
  Recombinant PKD2
GNRPPIAIVSPQFQEISLPTTSTVIDGSQSTDDHKIVQYHWEELKGPLREEKISEDTAILKLSKLVPGNYTFSLTVVDSDGATNSTTANLTVNKAVDYPG

SEQ ID NO: 57 - protein, 100 aa, Artificial Sequence
  Recombinant PKD2
GNRPPIAIVSPQFQEISLPTTSTVIDGSQSTDDDHIVQYHWEELKGPLREEKISEDTAILKLSKLVPGNYTFSLTVVDSDGATNSTTANLTVNKAVDYPG

SEQ ID NO: 58 - protein, 100 aa, Artificial Sequence
  Recombinant PKD2
GNRPPIAIVSPQFQEISLPTTSTVIDGSQSTDDDKHVQYHWEELKGPLREEKISEDTAILKLSKLVPGNYTFSLTVVDSDGATNSTTANLTVNKAVDYPG

SEQ ID NO: 59 - protein, 100 aa, Artificial Sequence
  Recombinant PKD2
GNRPPIAIVSPQFQEISLPTTSTVIDGSQSTDDDKIHQYHWEELKGPLREEKISEDTAILKLSKLVPGNYTFSLTVVDSDGATNSTTANLTVNKAVDYPG

SEQ ID NO: 60 - protein, 100 aa, Artificial Sequence
  Recombinant PKD2
GNRPPIAIVSPQFQEISLPTTSTVIDGSQSTDDDKIVQHHWEELKGPLREEKISEDTAILKLSKLVPGNYTFSLTVVDSDGATNSTTANLTVNKAVDYPG

SEQ ID NO: 61 - protein, 100 aa, Artificial Sequence
  Recombinant PKD2
GNRPPIAIVSPQFQEISLPTTSTVIDGSQSTDDDKIVQYHWEELKGPLREEKISEDTAHLKLSKLVPGNYTFSLTVVDSDGATNSTTANLTVNKAVDYPG

SEQ ID NO: 62 - protein, 100 aa, Artificial Sequence
  Recombinant PKD2
GNRPPIAIVSPQFQEISLPTTSTVIDGSQSTDDDKIHQHHWEELKGPLREEKISEDTAILKLSKLVPGNYTFSLTVVDSDGATNSTTANLTVNKAVDYPG

SEQ ID NO: 63 - protein, 100 aa, Artificial Sequence
  Recombinant PKD2
GNRPPIAIVSPQFQEISLPTTSTVIDGHHSTDDDKIVQYHWEELKGPLREEKISEDTAILKLSKLVPGNYTFSLTVVDSDGATNSTTANLTVNKAVDYPG

SEQ ID NO: 64 - protein, 99 aa, Artificial Sequence
  Recombinant PKD2
GNRPPIAIVSPQFQEISLPTTSTVIDGSQSTDDDKIVQYHWEELKGPLREEKISEDTAILKLSKLVPGNYTFSLTVVDSDGATNSTTANLTVNKAVDYP

SEQ ID NO: 65 - protein, 99 aa, Artificial Sequence
  Recombinant PKD2
GNRPPIAIVSPQFQEISLPTTSTVIDGHQSTDDDKIVQYHWEELKGPLREEKISEDTAILKLSKLVPGNYTFSLTVVDSDGATNSTTANLTVNKAVDYP

SEQ ID NO: 66 - protein, 99 aa, Artificial Sequence
  Recombinant PKD2
GNRPPIAIVSPQFQEISLPTTSTVIDGSHSTDDDKIVQYHWEELKGPLREEKISEDTAILKLSKLVPGNYTFSLTVVDSDGATNSTTANLTVNKAVDYP

SEQ ID NO: 67 - protein, 99 aa, Artificial Sequence
  Recombinant PKD2
GNRPPIAIVSPQFQEISLPTTSTVIDGSQSHDDDKIVQYHWEELKGPLREEKISEDTAILKLSKLVPGNYTFSLTVVDSDGATNSTTANLTVNKAVDYP

SEQ ID NO: 68 - protein, 99 aa, Artificial Sequence
  Recombinant PKD2
GNRPPIAIVSPQFQEISLPTTSTVIDGSQSTDDHKIVQYHWEELKGPLREEKISEDTAILKLSKLVPGNYTFSLTVVDSDGATNSTTANLTVNKAVDYP

SEQ ID NO: 69 - protein, 99 aa, Artificial Sequence
  Recombinant PKD2
GNRPPIAIVSPQFQEISLPTTSTVIDGSQSTDDDHIVQYHWEELKGPLREEKISEDTAILKLSKLVPGNYTFSLTVVDSDGATNSTTANLTVNKAVDYP

SEQ ID NO: 70 - protein, 99 aa, Artificial Sequence
  Recombinant PKD2
GNRPPIAIVSPQFQEISLPTTSTVIDGSQSTDDDKHVQYHWEELKGPLREEKISEDTAILKLSKLVPGNYTFSLTVVDSDGATNSTTANLTVNKAVDYP

SEQ ID NO: 71 - protein, 99 aa, Artificial Sequence
  Recombinant PKD2
GNRPPIAIVSPQFQEISLPTTSTVIDGSQSTDDDKIHQYHWEELKGPLREEKISEDTAILKLSKLVPGNYTFSLTVVDSDGATNSTTANLTVNKAVDYP

SEQ ID NO: 72 - protein, 99 aa, Artificial Sequence
  Recombinant PKD2
GNRPPIAIVSPQFQEISLPTTSTVIDGSQSTDDDKIVQHHWEELKGPLREEKISEDTAILKLSKLVPGNYTFSLTVVDSDGATNSTTANLTVNKAVDYP

SEQ ID NO: 73 - protein, 99 aa, Artificial Sequence
  Recombinant PKD2
GNRPPIAIVSPQFQEISLPTTSTVIDGSQSTDDDKIVQYHWEELKGPLREEKISEDTAHLKLSKLVPGNYTFSLTVVDSDGATNSTTANLTVNKAVDYP

SEQ ID NO: 74 - protein, 99 aa, Artificial Sequence
  Recombinant PKD2
GNRPPIAIVSPQFQEISLPTTSTVIDGSQSTDDDKIHQHHWEELKGPLREEKISEDTAILKLSKLVPGNYTFSLTVVDSDGATNSTTANLTVNKAVDYP

SEQ ID NO: 75 - protein, 99 aa, Artificial Sequence
  Recombinant PKD2
GNRPPIAIVSPQFQEISLPTTSTVIDGHHSTDDDKIVQYHWEELKGPLREEKISEDTAILKLSKLVPGNYTFSLTVVDSDGATNSTTANLTVNKAVDYP

SEQ ID NO: 76 - protein, 90 aa, Artificial Sequence
  Recombinant PKD2
IAIVSPQFQEISLPTTSTVIDGHQSTDDDKIVQYHWEELKGPLREEKISEDTAILKLSKLVPGNYTFSLTVVDSDGATNSTTANLTVNKA

SEQ ID NO: 77 - protein, 90 aa, Artificial Sequence
  Recombinant PKD2
IAIVSPQFQEISLPTTSTVIDGSHSTDDDKIVQYHWEELKGPLREEKISEDTAILKLSKLVPGNYTFSLTVVDSDGATNSTTANLTVNKA

SEQ ID NO: 78 - protein, 90 aa, Artificial Sequence
  Recombinant PKD2
IAIVSPQFQEISLPTTSTVIDGSQSHDDDKIVQYHWEELKGPLREEKISEDTAILKLSKLVPGNYTFSLTVVDSDGATNSTTANLTVNKA

SEQ ID NO: 79 - protein, 90 aa, Artificial Sequence
  Recombinant PKD2
IAIVSPQFQEISLPTTSTVIDGSQSTDDHKIVQYHWEELKGPLREEKISEDTAILKLSKLVPGNYTFSLTVVDSDGATNSTTANLTVNKA

SEQ ID NO: 80 - protein, 90 aa, Artificial Sequence
  Recombinant PKD2
IAIVSPQFQEISLPTTSTVIDGSQSTDDDHIVQYHWEELKGPLREEKISEDTAILKLSKLVPGNYTFSLTVVDSDGATNSTTANLTVNKA

SEQ ID NO: 81 - protein, 90 aa, Artificial Sequence
  Recombinant PKD2
IAIVSPQFQEISLPTTSTVIDGSQSTDDDKHVQYHWEELKGPLREEKISEDTAILKLSKLVPGNYTFSLTVVDSDGATNSTTANLTVNKA

SEQ ID NO: 82 - protein, 90 aa, Artificial Sequence
  Recombinant PKD2
IAIVSPQFQEISLPTTSTVIDGSQSTDDDKIHQYHWEELKGPLREEKISEDTAILKLSKLVPGNYTFSLTVVDSDGATNSTTANLTVNKA

SEQ ID NO: 83 - protein, 90 aa, Artificial Sequence
  Recombinant PKD2
IAIVSPQFQEISLPTTSTVIDGSQSTDDDKIVQHHWEELKGPLREEKISEDTAILKLSKLVPGNYTFSLTVVDSDGATNSTTANLTVNKA

SEQ ID NO: 84 - protein, 90 aa, Artificial Sequence
  Recombinant PKD2
IAIVSPQFQEISLPTTSTVIDGSQSTDDDKIVQYHWEELKGPLREEKISEDTAHLKLSKLVPGNYTFSLTVVDSDGATNSTTANLTVNKA

SEQ ID NO: 85 - protein, 90 aa, Artificial Sequence
  Recombinant PKD2
IAIVSPQFQEISLPTTSTVIDGSQSTDDDKIHQHHWEELKGPLREEKISEDTAILKLSKLVPGNYTFSLTVVDSDGATNSTTANLTVNKA

SEQ ID NO: 86 - protein, 90 aa, Artificial Sequence
  Recombinant PKD2
IAIVSPQFQEISLPTTSTVIDGHHSTDDDKIVQYHWEELKGPLREEKISEDTAILKLSKLVPGNYTFSLTVVDSDGATNSTTANLTVNKA

SEQ ID NO: 87 - protein, 400 aa, Artificial Sequence
  Polypeptide with Phase Behavior
GVGVPGLGVPGVGVPGLGVPGVGVPGVGVPGLGVPGVGVPGLGVPGVGVPGVGVPGLGVPGVGVPGLGVPGVGVPGVGVPGLGVPGVGVPGLGVPGVGVPGVGVPGLGVPGVGVPGLGVPGVGVPGVGVPGLGVPGVGVPGLGVPGVGVPGVGVPGLGVPGVGVPGLGVPGVGVPGVGVPGLGVPGVGVPGLGVPGVGVPGVGVPGLGVPGVGVPGLGVPGVGVPGVGVPGLGVPGVGVPGLGVPGVGVPGVGVPGLGVPGVGVPGLGVPGVGVPGVGVPGLGVPGVGVPGLGVPGVGVPGVGVPGLGVPGVGVPGLGVPGVGVPGVGVPGLGVPGVGVPGLGVPGVGVPGVGVPGLGVPGVGVPGLGVPGVGVPGVGVPGLGVPGVGVPGLGVPGVGVP

SEQ ID NO: 88 - protein, 401 aa, Artificial Sequence
  Polypeptide with Phase Behavior
GVGVPGLGVPGVGVPGLGVPGVGVPGVGVPGLGVPGVGVPGLGVPGVGVPGVGVPGLGVPGVGVPGLGVPGVGVPGVGVPGLGVPGVGVPGLGVPGVGVPGVGVPGLGVPGVGVPGLGVPGVGVPGVGVPGLGVPGVGVPGLGVPGVGVPGVGVPGLGVPGVGVPGLGVPGVGVPGVGVPGLGVPGVGVPGLGVPGVGVPGVGVPGLGVPGVGVPGLGVPGVGVPGVGVPGLGVPGVGVPGLGVPGVGVPGVGVPGLGVPGVGVPGLGVPGVGVPGVGVPGLGVPGVGVPGLGVPGVGVPGVGVPGLGVPGVGVPGLGVPGVGVPGVGVPGLGVPGVGVPGLGVPGVGVPGVGVPGLGVPGVGVPGLGVPGVGVPGVGVPGLGVPGVGVPGLGVPGVGVPG

SEQ ID NO: 89 - protein, 5 aa, Artificial Sequence
  AAV-binding polypeptide optional N-terminal sequence
GNRPP

SEQ ID NO: 90 - protein, 5 aa, Artificial Sequence
  AAV-binding polypeptide optional C-terminal sequence
VYDPG

SEQ ID NO: 91 - protein, 4 aa, Artificial Sequence
  AAV-binding polypeptide optional C-terminal sequence
VYDP

SEQ ID NO: 92 - protein, 290 aa, Artificial Sequence
  AAV binding polypeptide
MASVSAGESVQITLPKNEVQLNAYVLQEPPKGETYTYDWQLITHPRDYSGEMEGKHSQILKLSKLTPGLYEFKVIVEGQNAHGEGYVNVTVKPEPRKNRPPIAIVSPQFQEISLPTTSTVIDGSQSTDDDKIVQYHWEELKGPLREEKISEDTAILKLSKLVPGNYTFSLTVVDSDGATNSTTANLTVNKAVDYPPVANAGPNQVITLPQNSITLFGNQSTDDHGITSYEWSLSPSSKGKVVEMQGVRTPTLQLSAMQEGDYTYQLTVTDTIGQQATAQVTVIVQPENNK

SEQ ID NO: 93 - DNA, 300 bp, Artificial Sequence
  Recombinant PKD2
gggaatcgtccgcccatcgctattgtcagccctcaatttcaggagatcagcttgccgacaacctccactgtaattgatggttcccagtcgaccgacgacgataaaatcgtacaataccactgggaggaactcaaggggccgctgcgtgaggaaaagatcagcgaggataccgcaattttgaaacttagtaaactggttcccggcaactacacattttctttaacggttgtagactcggatggtgccaccaactctacgaccgctaatcttacagtgaacaaagcggtcgattatccgggc

SEQ ID NO: 94 - DNA, 300 bp, Artificial Sequence
  Recombinant PKD2
gggaatcgtccgcccatcgctattgtcagccctcaatttcaggagatcagcttgccgacaacctccactgtaattgatggtcatcagtcgaccgacgacgataaaatcgtacaataccactgggaggaactcaaggggccgctgcgtgaggaaaagatcagcgaggataccgcaattttgaaacttagtaaactggttcccggcaactacacattttctttaacggttgtagactcggatggtgccaccaactctacgaccgctaatcttacagtgaacaaagcggtcgattatccgggc

SEQ ID NO: 95 - DNA, 300 bp, Artificial Sequence
  Recombinant PKD2
gggaatcgtccgcccatcgctattgtcagccctcaatttcaggagatcagcttgccgacaacctccactgtaattgatggttcccattcgaccgacgacgataaaatcgtacaataccactgggaggaactcaaggggccgctgcgtgaggaaaagatcagcgaggataccgcaattttgaaacttagtaaactggttcccggcaactacacattttctttaacggttgtagactcggatggtgccaccaactctacgaccgctaatcttacagtgaacaaagcggtcgattatccgggc

SEQ ID NO: 96 - DNA, 300 bp, Artificial Sequence
  Recombinant PKD2
gggaatcgtccgcccatcgctattgtcagccctcaatttcaggagatcagcttgccgacaacctccactgtaattgatggttcccagtcgcatgacgacgataaaatcgtacaataccactgggaggaactcaaggggccgctgcgtgaggaaaagatcagcgaggataccgcaattttgaaacttagtaaactggttcccggcaactacacattttctttaacggttgtagactcggatggtgccaccaactctacgaccgctaatcttacagtgaacaaagcggtcgattatccgggc

SEQ ID NO: 97 - DNA, 300 bp, Artificial Sequence
  Recombinant PKD2
gggaatcgtccgcccatcgctattgtcagccctcaatttcaggagatcagcttgccgacaacctccactgtaattgatggttcccagtcgaccgacgaccataaaatcgtacaataccactgggaggaactcaaggggccgctgcgtgaggaaaagatcagcgaggataccgcaattttgaaacttagtaaactggttcccggcaactacacattttctttaacggttgtagactcggatggtgccaccaactctacgaccgctaatcttacagtgaacaaagcggtcgattatccgggc

SEQ ID NO: 98 - DNA, 300 bp, Artificial Sequence
  Recombinant PKD2
gggaatcgtccgcccatcgctattgtcagccctcaatttcaggagatcagcttgccgacaacctccactgtaattgatggttcccagtcgaccgacgacgatcatatcgtacaataccactgggaggaactcaaggggccgctgcgtgaggaaaagatcagcgaggataccgcaattttgaaacttagtaaactggttcccggcaactacacattttctttaacggttgtagactcggatggtgccaccaactctacgaccgctaatcttacagtgaacaaagcggtcgattatccgggc

SEQ ID NO: 99 - DNA, 300 bp, Artificial Sequence
  Recombinant PKD2
gggaatcgtccgcccatcgctattgtcagccctcaatttcaggagatcagcttgccgacaacctccactgtaattgatggttcccagtcgaccgacgacgataaacatgtacaataccactgggaggaactcaaggggccgctgcgtgaggaaaagatcagcgaggataccgcaattttgaaacttagtaaactggttcccggcaactacacattttctttaacggttgtagactcggatggtgccaccaactctacgaccgctaatcttacagtgaacaaagcggtcgattatccgggc

SEQ ID NO: 100 - DNA, 300 bp, Artificial Sequence
  Recombinant PKD2
gggaatcgtccgcccatcgctattgtcagccctcaatttcaggagatcagcttgccgacaacctccactgtaattgatggttcccagtcgaccgacgacgataaaatccatcaataccactgggaggaactcaaggggccgctgcgtgaggaaaagatcagcgaggataccgcaattttgaaacttagtaaactggttcccggcaactacacattttctttaacggttgtagactcggatggtgccaccaactctacgaccgctaatcttacagtgaacaaagcggtcgattatccgggc

SEQ ID NO: 101 - DNA, 300 bp, Artificial Sequence
  Recombinant PKD2
gggaatcgtccgcccatcgctattgtcagccctcaatttcaggagatcagcttgccgacaacctccactgtaattgatggttcccagtcgaccgacgacgataaaatcgtacaacatcactgggaggaactcaaggggccgctgcgtgaggaaaagatcagcgaggataccgcaattttgaaacttagtaaactggttcccggcaactacacattttctttaacggttgtagactcggatggtgccaccaactctacgaccgctaatcttacagtgaacaaagcggtcgattatccgggc

SEQ ID NO: 102 - DNA, 300 bp, Artificial Sequence
  Recombinant PKD2
gggaatcgtccgcccatcgctattgtcagccctcaatttcaggagatcagcttgccgacaacctccactgtaattgatggttcccagtcgaccgacgacgataaaatcgtacaataccactgggaggaactcaaggggccgctgcgtgaggaaaagatcagcgaggataccgcacatttgaaacttagtaaactggttcccggcaactacacattttctttaacggttgtagactcggatggtgccaccaactctacgaccgctaatcttacagtgaacaaagcggtcgattatccgggc

SEQ ID NO: 103 - DNA, 300 bp, Artificial Sequence
  Recombinant PKD2
gggaatcgtccgcccatcgctattgtcagccctcaatttcaggagatcagcttgccgacaacctccactgtaattgatggttcccagtcgaccgacgacgataaaatccaccaacatcactgggaggaactcaaggggccgctgcgtgaggaaaagatcagcgaggataccgcaattttgaaacttagtaaactggttcccggcaactacacattttctttaacggttgtagactcggatggtgccaccaactctacgaccgctaatcttacagtgaacaaagcggtcgattatccgggc

SEQ ID NO: 104 - DNA, 300 bp, Artificial Sequence
  Recombinant PKD2
gggaatcgtccgcccatcgctattgtcagccctcaatttcaggagatcagcttgccgacaacctccactgtaattgatggtcatcactcgaccgacgacgataaaatcgtacaataccactgggaggaactcaaggggccgctgcgtgaggaaaagatcagcgaggataccgcaattttgaaacttagtaaactggttcccggcaactacacattttctttaacggttgtagactcggatggtgccaccaactctacgaccgctaatcttacagtgaacaaagcggtcgattatccgggc

SEQ ID NO: 105 - DNA, 400 bp, Artificial Sequence
  Recombinant PKD2
aattcccctctagaaataattttgtttaactttaagaaggaggagtacatatggggaatcgtccgcccatcgctattgtcagccctcaatttcaggagatcagcttgccgacaacctccactgtaattgatggttcccagtcgaccgacgacgataaaatcgtacaataccactgggaggaactcaaggggccgctgcgtgaggaaaagatcagcgaggataccgcaattttgaaacttagtaaactggttcccggcaactacacattttctttaacggttgtagactcggatggtgccaccaactctacgaccgctaatcttacagtgaacaaagcggtcgattatccgggctactgataatgatcttcaggatccgaattcgagctccgtcgacaagc

SEQ ID NO: 106 - DNA, 400 bp, Artificial Sequence
  Recombinant PKD2
aattcccctctagaaataattttgtttaactttaagaaggaggagtacatatggggaatcgtccgcccatcgctattgtcagccctcaatttcaggagatcagcttgccgacaacctccactgtaattgatggtcatcagtcgaccgacgacgataaaatcgtacaataccactgggaggaactcaaggggccgctgcgtgaggaaaagatcagcgaggataccgcaattttgaaacttagtaaactggttcccggcaactacacattttctttaacggttgtagactcggatggtgccaccaactctacgaccgctaatcttacagtgaacaaagcggtcgattatccgggctactgataatgatcttcaggatccgaattcgagctccgtcgacaagc

SEQ ID NO: 107 - DNA, 400 bp, Artificial Sequence
  Recombinant PKD2
aattcccctctagaaataattttgtttaactttaagaaggaggagtacatatggggaatcgtccgcccatcgctattgtcagccctcaatttcaggagatcagcttgccgacaacctccactgtaattgatggttcccattcgaccgacgacgataaaatcgtacaataccactgggaggaactcaaggggccgctgcgtgaggaaaagatcagcgaggataccgcaattttgaaacttagtaaactggttcccggcaactacacattttctttaacggttgtagactcggatggtgccaccaactctacgaccgctaatcttacagtgaacaaagcggtcgattatccgggctactgataatgatcttcaggatccgaattcgagctccgtcgacaagc

SEQ ID NO: 108 - DNA, 400 bp, Artificial Sequence
  Recombinant PKD2
aattcccctctagaaataattttgtttaactttaagaaggaggagtacatatggggaatcgtccgcccatcgctattgtcagccctcaatttcaggagatcagcttgccgacaacctccactgtaattgatggttcccagtcgcatgacgacgataaaatcgtacaataccactgggaggaactcaaggggccgctgcgtgaggaaaagatcagcgaggataccgcaattttgaaacttagtaaactggttcccggcaactacacattttctttaacggttgtagactcggatggtgccaccaactctacgaccgctaatcttacagtgaacaaagcggtcgattatccgggctactgataatgatcttcaggatccgaattcgagctccgtcgacaagc

SEQ ID NO: 109 - DNA, 400 bp, Artificial Sequence
  Recombinant PKD2
aattcccctctagaaataattttgtttaactttaagaaggaggagtacatatggggaatcgtccgcccatcgctattgtcagccctcaatttcaggagatcagcttgccgacaacctccactgtaattgatggttcccagtcgaccgacgaccataaaatcgtacaataccactgggaggaactcaaggggccgctgcgtgaggaaaagatcagcgaggataccgcaattttgaaacttagtaaactggttcccggcaactacacattttctttaacggttgtagactcggatggtgccaccaactctacgaccgctaatcttacagtgaacaaagcggtcgattatccgggctactgataatgatcttcaggatccgaattcgagctccgtcgacaagc

SEQ ID NO: 110 - DNA, 400 bp, Artificial Sequence
  Recombinant PKD2
aattcccctctagaaataattttgtttaactttaagaaggaggagtacatatggggaatcgtccgcccatcgctattgtcagccctcaatttcaggagatcagcttgccgacaacctccactgtaattgatggttcccagtcgaccgacgacgatcatatcgtacaataccactgggaggaactcaaggggccgctgcgtgaggaaaagatcagcgaggataccgcaattttgaaacttagtaaactggttcccggcaactacacattttctttaacggttgtagactcggatggtgccaccaactctacgaccgctaatcttacagtgaacaaagcggtcgattatccgggctactgataatgatcttcaggatccgaattcgagctccgtcgacaagc

SEQ ID NO: 111 - DNA, 400 bp, Artificial Sequence
  Recombinant PKD2
aattcccctctagaaataattttgtttaactttaagaaggaggagtacatatggggaatcgtccgcccatcgctattgtcagccctcaatttcaggagatcagcttgccgacaacctccactgtaattgatggttcccagtcgaccgacgacgataaacatgtacaataccactgggaggaactcaaggggccgctgcgtgaggaaaagatcagcgaggataccgcaattttgaaacttagtaaactggttcccggcaactacacattttctttaacggttgtagactcggatggtgccaccaactctacgaccgctaatcttacagtgaacaaagcggtcgattatccgggctactgataatgatcttcaggatccgaattcgagctccgtcgacaagc

SEQ ID NO: 112 - DNA, 400 bp, Artificial Sequence
  Recombinant PKD2
aattcccctctagaaataattttgtttaactttaagaaggaggagtacatatggggaatcgtccgcccatcgctattgtcagccctcaatttcaggagatcagcttgccgacaacctccactgtaattgatggttcccagtcgaccgacgacgataaaatccatcaataccactgggaggaactcaaggggccgctgcgtgaggaaaagatcagcgaggataccgcaattttgaaacttagtaaactggttcccggcaactacacattttctttaacggttgtagactcggatggtgccaccaactctacgaccgctaatcttacagtgaacaaagcggtcgattatccgggctactgataatgatcttcaggatccgaattcgagctccgtcgacaagc

SEQ ID NO: 113 - DNA, 400 bp, Artificial Sequence
  Recombinant PKD2
aattcccctctagaaataattttgtttaactttaagaaggaggagtacatatggggaatcgtccgcccatcgctattgtcagccctcaatttcaggagatcagcttgccgacaacctccactgtaattgatggttcccagtcgaccgacgacgataaaatcgtacaacatcactgggaggaactcaaggggccgctgcgtgaggaaaagatcagcgaggataccgcaattttgaaacttagtaaactggttcccggcaactacacattttctttaacggttgtagactcggatggtgccaccaactctacgaccgctaatcttacagtgaacaaagcggtcgattatccgggctactgataatgatcttcaggatccgaattcgagctccgtcgacaagc

SEQ ID NO: 114 - DNA, 400 bp, Artificial Sequence
  Recombinant PKD2
aattcccctctagaaataattttgtttaactttaagaaggaggagtacatatggggaatcgtccgcccatcgctattgtcagccctcaatttcaggagatcagcttgccgacaacctccactgtaattgatggttcccagtcgaccgacgacgataaaatcgtacaataccactgggaggaactcaaggggccgctgcgtgaggaaaagatcagcgaggataccgcacatttgaaacttagtaaactggttcccggcaactacacattttctttaacggttgtagactcggatggtgccaccaactctacgaccgctaatcttacagtgaacaaagcggtcgattatccgggctactgataatgatcttcaggatccgaattcgagctccgtcgacaagc

SEQ ID NO: 115 - DNA, 400 bp, Artificial Sequence
  Recombinant PKD2
aattcccctctagaaataattttgtttaactttaagaaggaggagtacatatggggaatcgtccgcccatcgctattgtcagccctcaatttcaggagatcagcttgccgacaacctccactgtaattgatggttcccagtcgaccgacgacgataaaatccaccaacatcactgggaggaactcaaggggccgctgcgtgaggaaaagatcagcgaggataccgcaattttgaaacttagtaaactggttcccggcaactacacattttctttaacggttgtagactcggatggtgccaccaactctacgaccgctaatcttacagtgaacaaagcggtcgattatccgggctactgataatgatcttcaggatccgaattcgagctccgtcgacaagc

SEQ ID NO: 116 - DNA, 400 bp, Artificial Sequence
  Recombinant PKD2
aattcccctctagaaataattttgtttaactttaagaaggaggagtacatatggggaatcgtccgcccatcgctattgtcagccctcaatttcaggagatcagcttgccgacaacctccactgtaattgatggtcatcactcgaccgacgacgataaaatcgtacaataccactgggaggaactcaaggggccgctgcgtgaggaaaagatcagcgaggataccgcaattttgaaacttagtaaactggttcccggcaactacacattttctttaacggttgtagactcggatggtgccaccaactctacgaccgctaatcttacagtgaacaaagcggtcgattatccgggctactgataatgatcttcaggatccgaattcgagctccgtcgacaagc

SEQ ID NO: 117 - protein, 365 aa, Homo Sapiens
MALLLCFVLLCGVVDFARSLSITTPEEMIEKAKGETAYLPCKFTLSPEDQGPLDIEWLISPADNQKVDQVIILYSGDKIYDDYYPDLKGRVHFTSNDLKSGDASINVTNLQLSDIGTYQCKVKKAPGVANKKIHLVVLVKPSGARCYVDGSEEIGSDFKIKCEPKEGSLPLQYEWQKLSDSQKMPTSWLAEMTSSVISVKNASSEYSGTYSCTVRNRVGSDQCLLRLNVVPPSNKAGLIAGAIIGTLLALALIGLIIFCCRKKRREEKYEKEVHHDIREDVPPPKSRTSTARSYIGSNHSSLGSMSPSNMEGYSKTQYNQVPSEDFERTPQSPTLPPAKVAAPNLSRMGAIPVMIPAQSKDGSIV

SEQ ID NO: 118 - protein, 219 aa, Homo Sapiens
MLSITTPEEMIEKAKGETAYLPCKFTLSPEDQGPLDIEWLISPADNQKVDQVIILYSGDKIYDDYYPDLKGRVHFTSNDLKSGDASINVTNLQLSDIGTYQCKVKKAPGVANKKIHLVVLVKPSGARCYVDGSEEIGSDFKIKCEPKEGSLPLQYEWQKLSDSQKMPTSWLAEMTSSVISVKNASSEYSGTYSCTVRNRVGSDQCLLRLNVVPPSNKAG

SEQ ID NO: 119 - protein, 122 aa, Homo Sapiens
MITTPEEMIEKAKGETAYLPCKFTLSPEDQGPLDIEWLISPADNQKVDQVIILYSGDKIYDDYYPDLKGRVHFTSNDLKSGDASINVTNLQLSDIGTYQCKVKKAPGVANKKIHLVVLVKPS

SEQ ID NO: 120 - protein, 116 aa, Homo Sapiens
MLSITTPEEMIEKAKGETAYLPCKFTLSPEDQGPLDIEWLISPADNQKVDQVIILYSGDKIYDDYYPDLKGRVHFTSNDLKSGDASINVTNLQLSDIGTYQCKVKKAPGVANKKIH

SEQ ID NO: 121 - protein, 89 aa, Homo Sapiens
MPSGARCYVDGSEEIGSDFKIKCEPKEGSLPLQYEWQKLSDSQKMPTSWLAEMTSSVISVKNASSEYSGTYSCTVRNRVGSDQCLLRLN

SEQ ID NO: 122 - protein, 219 aa, Homo Sapiens
MLSITTPEEMIEKAKGETAYLPCKFTLSPEDQGPLDIEWLISPADNQKVDQVGRCATSKEPYVHCQKLHRQRVHFTSNDLKSGDASINVTNLQLSDIGTYQCKVKKAPGVANKKIHLVVLVKPSGARCYVDGSEEIGSDFKIKCEPKEGSLPLQYEWQKLSDSQKMPTSWLAEMTSSVISVKNASSEYSGTYSCTVRNRVGSDQCLLRLNVVPPSNKAG

SEQ ID NO: 123 - protein, 182 aa, Homo Sapiens
MLSITTPEEMIEKAKGETAYLPCKFTLSPEDQGPLDIEWLISPADNQKVDQVGRCATSKEPYVHCQKLHRQRVHFTSNDLKSGDASINVTNLQLSDIGTYQCKVKKAPGVANKKIHLVVLGKMCHLQRAVRPLPEATSAVIIHPWGPCLLPTWKDIPRLSITKYQVKTLNALLRVRLSHLLR

SEQ ID NO: 124 - protein, 235 aa, Homo Sapiens
MLSITTPEEMIEKAKGETAYLPCKFTLSPEDQGPLDIEWLISPADNQKVDQVIILYSGDKIYDDYYPDLKGRVHFTSNDLKSGDASINVTNLQLSDIGTYQCKVKKAPGVANKKIHLVVLVKPSGARCYVDGSEEIGSDFKIKCEPKEGSLPLQYEWQKLSDSQKMPTSWLAEGKMCHLQRAVRPLPEATSAVIIHPWGPCLLPTWKDIPRLSITKYQVKTLNALLRVRLSHLLR

SEQ ID NO: 125 - protein, 178 aa, Homo Sapiens
MLSITTPEEMIEKAKGETAYLPCKFTLSPEDQGPLDIEWLISPADNQKVDQVIILYSGDKIYDDYYPDLKGRVHFTSNDLKSGDASINVTNLQLSDIGTYQCKVKKAPGVANKKIHLVVLVKPSGARCYVDGSEEIGSDFKIKCEPKEGSLPLQYEWQKLSDSQKMPTSWLAASNKAG

SEQ ID NO: 126 - protein, 860 aa, Homo Sapiens [sequence omitted]

SEQ ID NO: 127 - protein, 768 aa, Homo Sapiens
MAVGDRCERNEFQCQDGKCISYKWVCDGSAECQDGSDESQETCLSVTCKSGDFSCGGRVNRCIPQFWRCDGQVDCDNGSDEQGCPPKTCSQDEFRCHDGKCISRQFVCDSDRDCLDGSDEASCPVLTCGPASFQCNSSTCIPQLWACDNDPDCEDGSDEWPQRCRGLYVFQGDSSPCSAFEFHCLSGECIHSSWRCDGGPDCKDKSDEENCAVATCRPDEFQCSDGNCIHGSRQCDREYDCKDMSDEVGCVNVTLCEGPNKFKCHSGECITLDKVCNMARDCRDWSDEPIKECGTNECLDNNGGCSHVCNDLKIGYECLCPDGFQLVAQRRCEDIDECQDPDTCSQLCVNLEGGYKCQCEEGFQLDPHTKACKAVGSIAYLFFTNRHEVRKMTLDRSEYTSLIPNLRNVVALDTEVASNRIYWSDLSQRMICSTQLDRAHGVSSYDTVISRDIQAPDGLAVDWIHSNIYWTDSVLGTVSVADTKGVKRKTLFRENGSKPRAIVVDPVHGFMYWTDWGTPAKIKKGGLNGVDIYSLVTENIQWPNGITLDLLSGRLYWVDSKLHSISSIDVNGGNRKTILEDEKRLAHPFSLAVFEDKVFWTDIINEAIFSANRLTGSDVNLLAENLLSPEDMVLFHNLTQPRGVNWCERTTLSNGGCQYLCLPAPQINPHSPKFTCACPDGMLLARDMRSCLTEAEAAVATQETSTVRLKVSSTAVRTQHTTTRPVPDTSRLPGATPGLTTVEIVTMSHQALGDVAGRGNEKKPSSVR

SEQ ID NO: 128 - protein, 40 aa, Homo Sapiens
MSVTCKSGDFSCGGRVNRCIPQFWRCDGQVDCDNGSDEQG

SEQ ID NO: 129 - protein, 38 aa, Homo Sapiens
MTCSQDEFRCHDGKCISRQFVCDSDRDCLDGSDEASCP

SEQ ID NO: 130 - protein, 330 aa, Homo Sapiens
MSVTCKSGDFSCGGRVNRCIPQFWRCDGQVDCDNGSDEQGCPPKTCSQDEFRCHDGKCISRQFVCDSDRDCLDGSDEASCPVLTCGPASFQCNSSTCIPQLWACDNDPDCEDGSDEWPQRCRGLYVFQGDSSPCSAFEFHCLSGECIHSSWRCDGGPDCKDKSDEENCAVATCRPDEFQCSDGNCIHGSRQCDREYDCKDMSDEVGCVNVTLCEGPNKFKCHSGECITLDKVCNMARDCRDWSDEPIKECGTNECLDNNGGCSHVCNDLKIGYECLCPDGFQLVAQRRCEDIDECQDPDTCSQLCVNLEGGYKCQCEEGFQLDPHTKACK

SEQ ID NO: 131 - protein, 458 aa, Homo Sapiens
MNRGVPFRHLLLVLQLALLPAATQGKKVVLGKKGDTVELTCTASQKKSIQFHWKNSNQIKILGNQGSFLTKGPSKLNDRADSRRSLWDQGNFPLIIKNLKIEDSDTYICEVEDQKEEVQLLVFGLTANSDTHLLQGQSLTLTLESPPGSSPSVQCRSPRGKNIQGGKTLSVSQLELQDSGTWTCTVLQNQKKVEFKIDIVVLAFQKASSIVYKKEGEQVEFSFPLAFTVEKLTGSGELWWQAERASSSKSWITFDLKNKEVSVKRVTQDPKLQMGKKLPLHLTLPQALPQYAGSGNLTLALEAKTGKLHQEVNLVVMRATQLQKNLTCEVWGPTSPKLMLSLKLENKEAKVSKREKAVWVLNPEAGMWQCLLSDSGQVLLESNIKVLPTWSTPVQPMALIVLGGVAGLLLFIGLGIFFCVRCRHRRRQAERMSQIKRLLSEKKTCQCPHRFQKTCSPI

SEQ ID NO: 132 - protein, 372 aa, Homo Sapiens
MKKVVLGKKGDTVELTCTASQKKSIQFHWKNSNQIKILGNQGSFLTKGPSKLNDRADSRRSLWDQGNFPLIIKNLKIEDSDTYICEVEDQKEEVQLLVFGLTANSDTHLLQGQSLTLTLESPPGSSPSVQCRSPRGKNIQGGKTLSVSQLELQDSGTWTCTVLQNQKKVEFKIDIVVLAFQKASSIVYKKEGEQVEFSFPLAFTVEKLTGSGELWWQAERASSSKSWITFDLKNKEVSVKRVTQDPKLQMGKKLPLHLTLPQALPQYAGSGNLTLALEAKTGKLHQEVNLVVMRATQLQKNLTCEVWGPTSPKLMLSLKLENKEAKVSKREKAVWVLNPEAGMWQCLLSDSGQVLLESNIKVLPTWSTPVQP

SEQ ID NO: 133 - protein, 179 aa, Homo Sapiens
MKKVVLGKKGDTVELTCTASQKKSIQFHWKNSNQIKILGNQGSFLTKGPSKLNDRADSRRSLWDQGNFPLIIKNLKIEDSDTYICEVEDQKEEVQLLVFGLTANSDTHLLQGQSLTLTLESPPGSSPSVQCRSPRGKNIQGGKTLSVSQLELQDSGTWTCTVLQNQKKVEFKIDIVVLA

SEQ ID NO: 134 - protein, 101 aa, Homo Sapiens
MKKVVLGKKGDTVELTCTASQKKSIQFHWKNSNQIKILGNQGSFLTKGPSKLNDRADSRRSLWDQGNFPLIIKNLKIEDSDTYICEVEDQKEEVQLLVFGL

SEQ ID NO: 135 - protein, 48 aa, Artificial Sequence
  Albumin-binding polypeptide
MLAEAKVLANRELDKYGVSDFYKRLINKAKTVEGVEALKLHLLAALPG

SEQ ID NO: 136 - protein, 253 aa, Staphylococcus aureus
MAAQHDEAQQNAFYQVLNMPNLNADQRNGFIQSLKDDPSQSANVLGEAKKLNESQAPKADNNFNKEQQNAFYEILNMPNLNEEQRNGFIQSLKDDPSQSANLLSEAKKLNESQAPKADNKFNKEQQNAFYEILHLPNLNEEQRNGFIQSLKDDPSQSANLLAEAKKLNDAQAPKADNKFNKEQQNAFYEILHLPNLTEEQRNGFIQSLKDDPSVSKEILAEAKKLNDAQAPKEEDNNKPGKEDGNKPGKEDGN

SEQ ID NO: 137 - protein, 59 aa, Staphylococcus aureus
MADNKFNKEQQNAFYEILHLPNLNEEQRNGFIQSLKDDPSQSANLLAEAKKLNDAQAPK

SEQ ID NO: 138 - protein, 59 aa, Staphylococcus aureus
MADNKFNKEQQNAFYEILHLPNLTEEQRNGFIQSLKDDPSVSKEILAEAKKLNDAQAPK

SEQ ID NO: 139 - protein, 992 aa, Finegoldia magna
MKINKKLLMAALAGAIVVGGGANAYAAEEDNTDNNLSMDEISDAYFDYHGDVSDSVDPVEEEIDEALAKALAEAKETAKKHIDSLNHLSETAKKLAKNDIDSATTINAINDIVARADVMERKTAEKEEAEKLAAAKETAKKHIDELKHLADKTKELAKRDIDSATTINAINDIVARADVMERKTAEKEEAEKLAAAKETAKKHIDELKHLADKTKELAKRDIDSATTIDAINDIVARADVMERKLSEKETPEPEEEVTIKANLIFADGSTQNAEFKGTFAKAVSDAYAYADALKKDNGEYTVDVADKGLTLNIKFAGKKEKPEEPKEEVTIKVNLIFADGKTQTAEFKGTFEEATAKAYAYADLLAKENGEYTADLEDGGNTINIKFAGKETPETPEEPKEEVTIKVNLIFADGKIQTAEFKGTFEEATAKAYAYANLLAKENGEYTADLEDGGNTINIKFAGKETPETPEEPKEEVTIKVNLIFADGKTQTAEFKGTFEEATAEAYRYADLLAKVNGEYTADLEDGGYTINIKFAGKEQPGENPGITIDEWLLKNAKEEAIKELKEAGITSDLYFSLINKAKTVEGVEALKNEILKAHAGEETPELKDGYATYEEAEAAAKEALKNDDVNNAYEIVQGADGRYYYVLKIEVADEEEPGEDTPEVQEGYATYEEAEAAAKEALKEDKVNNAYEVVQGADGRYYYVLKIEDKEDEQPGEEPGENPGITIDEWLLKNAKEDAIKELKEAGISSDIYFDAINKAKTVEGVEALKNEILKAHAEKPGENPGITIDEWLLKNAKEAAIKELKEAGITAEYLFNLINKAKTVEGVESLKNEILKAHAEKPGENPGITIDEWLLKNAKEDAIKELKEAGITSDIYFDAINKAKTIEGVEALKNEILKAHKKDEEPGKKPGEDKKPEDKKPGEDKKPEDKKPGEDKKPEDKKPGKTDKDSPNKKKKAKLPKAGSEAEILTLAAAALSTAAGAYVSLKKRK

SEQ ID NO: 140 - protein, 75 aa, Finegoldia magna
MKEEVTIKVNLIFADGKTQTAEFKGTFEEATAKAYAYADLLAKENGEYTADLEDGGNTINIKFAGKETPETPEEP

SEQ ID NO: 141 - protein, 210 aa, Artificial Sequence
  linker
  MISC_FEATURE (2)..(6): May be individually present or absent
  MISC_FEATURE (7)..(210): May be present or absent in groups of Gly Gly Gly Gly Gly Gly Ser with up to 5 Gly residues being absent or present
GGGGGGSGGGGGGSGGGGGGSGGGGGGSGGGGGGSGGGGGGSGGGGGGSGGGGGGSGGGGGGSGGGGGGSGGGGGGSGGGGGGSGGGGGGSGGGGGGSGGGGGGSGGGGGGSGGGGGGSGGGGGGSGGGGGGSGGGGGGSGGGGGGSGGGGGGSGGGGGGSGGGGGGSGGGGGGSGGGGGGSGGGGGGSGGGGGGSGGGGGGSGGGGGGS

SEQ ID NO: 142 - protein, 210 aa, Artificial Sequence
  linker
  MISC_FEATURE (2)..(6): May be individually present or absent
  MISC_FEATURE (7)..(210): May be present or absent in groups of Ser Ser Ser Ser Ser Ser Gly with up to 5 Ser residues being absent or present
SSSSSSGSSSSSSGSSSSSSGSSSSSSGSSSSSSGSSSSSSGSSSSSSGSSSSSSGSSSSSSGSSSSSSGSSSSSSGSSSSSSGSSSSSSGSSSSSSGSSSSSSGSSSSSSGSSSSSSGSSSSSSGSSSSSSGSSSSSSGSSSSSSGSSSSSSGSSSSSSGSSSSSSGSSSSSSGSSSSSSGSSSSSSGSSSSSSGSSSSSSGSSSSSSG

SEQ ID NO: 143 - protein, 800 aa, Artificial Sequence
  elastin-like polypeptide
  MISC_FEATURE (61)..(800): May be present or absent in groups of the repeat unit Gly Val Gly Val Pro
GVGVPGVGVPGVGVPGVGVPGVGVPGVGVPGVGVPGVGVPGVGVPGVGVPGVGVPGVGVPGVGVPGVGVPGVGVPGVGVPGVGVPGVGVPGVGVPGVGVPGVGVPGVGVPGVGVPGVGVPGVGVPGVGVPGVGVPGVGVPGVGVPGVGVPGVGVPGVGVPGVGVPGVGVPGVGVPGVGVPGVGVPGVGVPGVGVPGVGVPGVGVPGVGVPGVGVPGVGVPGVGVPGVGVPGVGVPGVGVPGVGVPGVGVPGVGVPGVGVPGVGVPGVGVPGVGVPGVGVPGVGVPGVGVPGVGVPGVGVPGVGVPGVGVPGVGVPGVGVPGVGVPGVGVPGVGVPGVGVPGVGVPGVGVPGVGVPGVGVPGVGVPGVGVPGVGVPGVGVPGVGVPGVGVPGVGVPGVGVPGVGVPGVGVPGVGVPGVGVPGVGVPGVGVPGVGVPGVGVPGVGVPGVGVPGVGVPGVGVPGVGVPGVGVPGVGVPGVGVPGVGVPGVGVPGVGVPGVGVPGVGVPGVGVPGVGVPGVGVPGVGVPGVGVPGVGVPGVGVPGVGVPGVGVPGVGVPGVGVPGVGVPGVGVPGVGVPGVGVPGVGVPGVGVPGVGVPGVGVPGVGVPGVGVPGVGVPGVGVPGVGVPGVGVPGVGVPGVGVPGVGVPGVGVPGVGVPGVGVPGVGVPGVGVPGVGVPGVGVPGVGVPGVGVPGVGVPGVGVPGVGVPGVGVPGVGVPGVGVPGVGVPGVGVPGVGVPGVGVPGVGVPGVGVPGVGVPGVGVPGVGVPGVGVPGVGVPGVGVPGVGVPGVGVPGVGVPGVGVP

SEQ ID NO: 144 - protein, 800 aa, Artificial Sequence
  elastin-like polypeptide
  MISC_FEATURE (51)..(800): May be present or absent in groups of the repeat unit Gly Val Gly Val Pro Gly Val Gly Val Pro Gly Ala Gly Val Pro Gly Val Gly Val Pro Gly Val Gly Val Pro
GVGVPGVGVPGAGVPGVGVPGVGVPGVGVPGVGVPGAGVPGVGVPGVGVPGVGVPGVGVPGAGVPGVGVPGVGVPGVGVPGVGVPGAGVPGVGVPGVGVPGVGVPGVGVPGAGVPGVGVPGVGVPGVGVPGVGVPGAGVPGVGVPGVGVPGVGVPGVGVPGAGVPGVGVPGVGVPGVGVPGVGVPGAGVPGVGVPGVGVPGVGVPGVGVPGAGVPGVGVPGVGVPGVGVPGVGVPGAGVPGVGVPGVGVPGVGVPGVGVPGAGVPGVGVPGVGVPGVGVPGVGVPGAGVPGVGVPGVGVPGVGVPGVGVPGAGVPGVGVPGVGVPGVGVPGVGVPGAGVPGVGVPGVGVPGVGVPGVGVPGAGVPGVGVPGVGVPGVGVPGVGVPGAGVPGVGVPGVGVPGVGVPGVGVPGAGVPGVGVPGVGVPGVGVPGVGVPGAGVPGVGVPGVGVPGVGVPGVGVPGAGVPGVGVPGVGVPGVGVPGVGVPGAGVPGVGVPGVGVPGVGVPGVGVPGAGVPGVGVPGVGVPGVGVPGVGVPGAGVPGVGVPGVGVPGVGVPGVGVPGAGVPGVGVPGVGVPGVGVPGVGVPGAGVPGVGVPGVGVPGVGVPGVGVPGAGVPGVGVPGVGVPGVGVPGVGVPGAGVPGVGVPGVGVPGVGVPGVGVPGAGVPGVGVPGVGVPGVGVPGVGVPGAGVPGVGVPGVGVPGVGVPGVGVPGAGVPGVGVPGVGVPGVGVPGVGVPGAGVPGVGVPGVGVPGVGVPGVGVPGAGVPGVGVPGVGVPGVGVPGVGVPGAGVPGVGVPGVGVP

SEQ ID NO: 145 - protein, 800 aa, Artificial Sequence
  elastin-like polypeptide
  MISC_FEATURE (51)..(800): May be present or absent in groups of the repeat unit Gly Val Gly Val Pro Gly Ala Gly Val Pro
GVGVPGAGVPGVGVPGAGVPGVGVPGAGVPGVGVPGAGVPGVGVPGAGVPGVGVPGAGVPGVGVPGAGVPGVGVPGAGVPGVGVPGAGVPGVGVPGAGVPGVGVPGAGVPGVGVPGAGVPGVGVPGAGVPGVGVPGAGVPGVGVPGAGVPGVGVPGAGVPGVGVPGAGVPGVGVPGAGVPGVGVPGAGVPGVGVPGAGVPGVGVPGAGVPGVGVPGAGVPGVGVPGAGVPGVGVPGAGVPGVGVPGAGVPGVGVPGAGVPGVGVPGAGVPGVGVPGAGVPGVGVPGAGVPGVGVPGAGVPGVGVPGAGVPGVGVPGAGVPGVGVPGAGVPGVGVPGAGVPGVGVPGAGVPGVGVPGAGVPGVGVPGAGVPGVGVPGAGVPGVGVPGAGVPGVGVPGAGVPGVGVPGAGVPGVGVPGAGVPGVGVPGAGVPGVGVPGAGVPGVGVPGAGVPGVGVPGAGVPGVGVPGAGVPGVGVPGAGVPGVGVPGAGVPGVGVPGAGVPGVGVPGAGVPGVGVPGAGVPGVGVPGAGVPGVGVPGAGVPGVGVPGAGVPGVGVPGAGVPGVGVPGAGVPGVGVPGAGVPGVGVPGAGVPGVGVPGAGVPGVGVPGAGVPGVGVPGAGVPGVGVPGAGVPGVGVPGAGVPGVGVPGAGVPGVGVPGAGVPGVGVPGAGVPGVGVPGAGVPGVGVPGAGVPGVGVPGAGVPGVGVPGAGVPGVGVPGAGVPGVGVPGAGVPGVGVPGAGVPGVGVPGAGVPGVGVPGAGVPGVGVPGAGVPGVGVPGAGVPGVGVPGAGVPGVGVPGAGVP

SEQ ID NO: 146 - protein, 800 aa, Artificial Sequence
  elastin-like polypeptide
  MISC_FEATURE (51)..(800): May be present or absent in groups of the repeat unit Gly Val Gly Val Pro Gly Val Gly Val Pro Gly Leu Gly Val Pro Gly Val Gly Val Pro Gly Val Gly Val Pro
GVGVPGVGVPGLGVPGVGVPGVGVPGVGVPGVGVPGLGVPGVGVPGVGVPGVGVPGVGVPGLGVPGVGVPGVGVPGVGVPGVGVPGLGVPGVGVPGVGVPGVGVPGVGVPGLGVPGVGVPGVGVPGVGVPGVGVPGLGVPGVGVPGVGVPGVGVPGVGVPGLGVPGVGVPGVGVPGVGVPGVGVPGLGVPGVGVPGVGVPGVGVPGVGVPGLGVPGVGVPGVGVPGVGVPGVGVPGLGVPGVGVPGVGVPGVGVPGVGVPGLGVPGVGVPGVGVPGVGVPGVGVPGLGVPGVGVPGVGVPGVGVPGVGVPGLGVPGVGVPGVGVPGVGVPGVGVPGLGVPGVGVPGVGVPGVGVPGVGVPGLGVPGVGVPGVGVPGVGVPGVGVPGLGVPGVGVPGVGVPGVGVPGVGVPGLGVPGVGVPGVGVPGVGVPGVGVPGLGVPGVGVPGVGVPGVGVPGVGVPGLGVPGVGVPGVGVPGVGVPGVGVPGLGVPGVGVPGVGVPGVGVPGVGVPGLGVPGVGVPGVGVPGVGVPGVGVPGLGVPGVGVPGVGVPGVGVPGVGVPGLGVPGVGVPGVGVPGVGVPGVGVPGLGVPGVGVPGVGVPGVGVPGVGVPGLGVPGVGVPGVGVPGVGVPGVGVPGLGVPGVGVPGVGVPGVGVPGVGVPGLGVPGVGVPGVGVPGVGVPGVGVPGLGVPGVGVPGVGVPGVGVPGVGVPGLGVPGVGVPGVGVPGVGVPGVGVPGLGVPGVGVPGVGVPGVGVPGVGVPGLGVPGVGVPGVGVPGVGVPGVGVPGLGVPGVGVPGVGVP

SEQ ID NO: 147 - protein, 800 aa, Artificial Sequence
  elastin-like polypeptide
  MISC_FEATURE (2)..(2): Xaa can be Gly, Ala, Val, Ile, Leu, Phe, Tyr, Trp, Lys, Arg, Asp, Glu or Ser
  MISC_FEATURE (7)..(7): Xaa can be Gly, Ala, Val, Ile, Leu, Phe, Tyr, Trp, Lys, Arg, Asp, Glu or Ser
  MISC_FEATURE (12)..(12): Xaa can be Gly, Ala, Val, Ile, Leu, Phe, Tyr, Trp, Lys, Arg, Asp, Glu or Ser
  MISC_FEATURE (17)..(17): Xaa can be Gly, Ala, Val, Ile, Leu, Phe, Tyr, Trp, Lys, Arg, Asp, Glu or Ser
  MISC_FEATURE (22)..(22): Xaa can be Gly, Ala, Val, Ile, Leu, Phe, Tyr, Trp, Lys, Arg, Asp, Glu or Ser
  MISC_FEATURE (27)..(27): Xaa can be Gly, Ala, Val, Ile, Leu, Phe, Tyr, Trp, Lys, Arg, Asp, Glu or Ser
  MISC_FEATURE (32)..(32): Xaa can be Gly, Ala, Val, Ile, Leu, Phe, Tyr, Trp, Lys, Arg, Asp, Glu or Ser
  MISC_FEATURE (37)..(37): Xaa can be Gly, Ala, Val, Ile, Leu, Phe, Tyr, Trp, Lys, Arg, Asp, Glu or Ser
  MISC_FEATURE (42)..(42): Xaa can be Gly, Ala, Val, Ile, Leu, Phe, Tyr, Trp, Lys, Arg, Asp, Glu or Ser
  MISC_FEATURE (47)..(47): Xaa can be Gly, Ala, Val, Ile, Leu, Phe, Tyr, Trp, Lys, Arg, Asp, Glu or Ser
  MISC_FEATURE (51)..(800): May be present or absent in groups of the repeat unit Gly Xaa Gly Val Pro
  MISC_FEATURE (52)..(52): Xaa can be Gly, Ala, Val, Ile, Leu, Phe, Tyr, Trp, Lys, Arg, Asp, Glu or Ser
  MISC_FEATURE (57)..(57): Xaa can be Gly, Ala, Val, Ile, Leu, Phe, Tyr, Trp, Lys, Arg, Asp, Glu or Ser
  MISC_FEATURE (62)..(62): Xaa can be Gly, Ala, Val, Ile, Leu, Phe, Tyr, Trp, Lys, Arg, Asp, Glu or Ser
  MISC_FEATURE (67)..(67): Xaa can be Gly, Ala, Val, Ile, Leu, Phe, Tyr, Trp, Lys, Arg, Asp, Glu or Ser
  MISC_FEATURE (72)..(72): Xaa can be Gly, Ala, Val, Ile, Leu, Phe, Tyr, Trp, Lys, Arg, Asp, Glu or Ser
  MISC_FEATURE (77)..(77): Xaa can be Gly, Ala, Val, Ile, Leu, Phe, Tyr, Trp, Lys, Arg, Asp, Glu or Ser
  MISC_FEATURE (82)..(82): Xaa can be Gly, Ala, Val, Ile, Leu, Phe, Tyr, Trp, Lys, Arg, Asp, Glu or Ser
  MISC_FEATURE (87)..(87): Xaa can be Gly, Ala, Val, Ile, Leu, Phe, Tyr, Trp, Lys, Arg, Asp, Glu or Ser
  MISC_FEATURE (92)..(92): Xaa can be Gly, Ala, Val, Ile, Leu, Phe, Tyr, Trp, Lys, Arg, Asp, Glu or Ser
  MISC_FEATURE (97)..(97): Xaa can be Gly, Ala, Val, Ile, Leu, Phe, Tyr, Trp, Lys, Arg, Asp, Glu or Ser
  MISC_FEATURE (102)..(102): Xaa can be Gly, Ala, Val, Ile, Leu, Phe, Tyr, Trp, Lys, Arg, Asp, Glu or Ser
  MISC_FEATURE (107)..(107): Xaa can be Gly, Ala, Val, Ile, Leu, Phe, Tyr, Trp, Lys, Arg, Asp, Glu or Ser
  MISC_FEATURE (112)..(112): Xaa can be Gly, Ala, Val, Ile, Leu, Phe, Tyr, Trp, Lys, Arg, Asp, Glu or Ser
  MISC_FEATURE (117)..(117): Xaa can be Gly, Ala, Val, Ile, Leu, Phe, Tyr, Trp, Lys, Arg, Asp, Glu or Ser
  MISC_FEATURE (122)..(122): Xaa can be Gly, Ala, Val, Ile, Leu, Phe, Tyr, Trp, Lys, Arg, Asp, Glu or Ser
  MISC_FEATURE (127)..(127): Xaa can be Gly, Ala, Val, Ile, Leu, Phe, Tyr, Trp, Lys, Arg, Asp, Glu or Ser
  MISC_FEATURE (132)..(132): Xaa can be Gly, Ala, Val, Ile, Leu, Phe, Tyr, Trp, Lys, Arg, Asp, Glu or Ser
  MISC_FEATURE (137)..(137): Xaa can be Gly, Ala, Val, Ile, Leu, Phe, Tyr, Trp, Lys, Arg, Asp, Glu or Ser
  MISC_FEATURE (142)..(142): Xaa can be Gly, Ala, Val, Ile, Leu, Phe, Tyr, Trp, Lys, Arg, Asp, Glu or Ser
  MISC_FEATURE (147)..(147): Xaa can be Gly, Ala, Val, Ile, Leu, Phe, Tyr, Trp, Lys, Arg, Asp, Glu or Ser
  MISC_FEATURE (152)..(152): Xaa can be Gly, Ala, Val, Ile, Leu, Phe, Tyr, Trp, Lys, Arg, Asp, Glu or Ser
  MISC_FEATURE (157)..(157): Xaa can be Gly, Ala, Val, Ile, Leu, Phe, Tyr, Trp, Lys, Arg, Asp, Glu or Ser
  MISC_FEATURE (162)..(162): Xaa can be Gly, Ala, Val, Ile, Leu, Phe, Tyr, Trp, Lys, Arg, Asp, Glu or Ser
  MISC_FEATURE (167)..(167): Xaa can be Gly, Ala, Val, Ile, Leu, Phe, Tyr, Trp, Lys, Arg, Asp, Glu or Ser
  MISC_FEATURE (172)..(172): Xaa can be Gly, Ala, Val, Ile, Leu, Phe, Tyr, Trp, Lys, Arg, Asp, Glu or Ser
  MISC_FEATURE (177)..(177): Xaa can be Gly, Ala, Val, Ile, Leu, Phe, Tyr, Trp, Lys, Arg, Asp, Glu or Ser
  MISC_FEATURE (182)..(182): Xaa can be Gly, Ala, Val, Ile, Leu, Phe, Tyr, Trp, Lys, Arg, Asp, Glu or Ser
  MISC_FEATURE (187)..(187): Xaa can be Gly, Ala, Val, Ile, Leu, Phe, Tyr, Trp, Lys, Arg, Asp, Glu or Ser
  MISC_FEATURE (192)..(192): Xaa can be Gly, Ala, Val, Ile, Leu, Phe, Tyr, Trp, Lys, Arg, Asp, Glu or Ser
  MISC_FEATURE (197)..(197): Xaa can be Gly, Ala, Val, Ile, Leu, Phe, Tyr, Trp, Lys, Arg, Asp, Glu or Ser
  MISC_FEATURE (202)..(202): Xaa can be Gly, Ala, Val, Ile, Leu, Phe, Tyr, Trp, Lys, Arg, Asp, Glu or Ser
  MISC_FEATURE (207)..(207): Xaa can be Gly, Ala, Val, Ile, Leu, Phe, Tyr, Trp, Lys, Arg, Asp, Glu or Ser
  MISC_FEATURE (212)..(212): Xaa can be Gly, Ala, Val, Ile, Leu, Phe, Tyr, Trp, Lys, Arg, Asp, Glu or Ser
  MISC_FEATURE (217)..(217): Xaa can be Gly, Ala, Val, Ile, Leu, Phe, Tyr, Trp, Lys, Arg, Asp, Glu or Ser
  MISC_FEATURE (222)..(222): Xaa can be Gly, Ala, Val, Ile, Leu, Phe, Tyr, Trp, Lys, Arg, Asp, Glu or Ser
  MISC_FEATURE (227)..(227): Xaa can be Gly, Ala, Val, Ile, Leu, Phe, Tyr, Trp, Lys, Arg, Asp, Glu or Ser
  MISC_FEATURE (232)..(232): Xaa can be Gly, Ala, Val, Ile, Leu, Phe, Tyr, Trp, Lys, Arg, Asp, Glu or Ser
  MISC_FEATURE (237)..(237): Xaa can be Gly, Ala, Val, Ile, Leu, Phe, Tyr, Trp, Lys, Arg, Asp, Glu or Ser
  MISC_FEATURE (242)..(242): Xaa can be Gly, Ala, Val, Ile, Leu, Phe, Tyr, Trp, Lys, Arg, Asp, Glu or Ser
  MISC_FEATURE (247)..(247): Xaa can be Gly, Ala, Val, Ile, Leu, Phe, Tyr, Trp, Lys, Arg, Asp, Glu or Ser
  MISC_FEATURE (252)..(252): Xaa can be Gly, Ala, Val, Ile, Leu, Phe, Tyr, Trp, Lys, Arg, Asp, Glu or Ser
  MISC_FEATURE (257)..(257): Xaa can be Gly, Ala, Val, Ile, Leu, Phe, Tyr, Trp, Lys, Arg, Asp, Glu or Ser
  MISC_FEATURE (262)..(262): Xaa can be Gly, Ala, Val, Ile, Leu, Phe, Tyr, Trp, Lys, Arg, Asp, Glu or Ser
  MISC_FEATURE (267)..(267): Xaa can be Gly, Ala, Val, Ile, Leu, Phe, Tyr, Trp, Lys, Arg, Asp, Glu or Ser
  MISC_FEATURE (272)..(272): Xaa can be Gly, Ala, Val, Ile, Leu, Phe, Tyr, Trp, Lys, Arg, Asp, Glu or Ser
  MISC_FEATURE (277)..(277): Xaa can be Gly, Ala, Val, Ile, Leu, Phe, Tyr, Trp, Lys, Arg, Asp, Glu or Ser
  MISC_FEATURE (282)..(282): Xaa can be Gly, Ala, Val, Ile, Leu, Phe, Tyr, Trp, Lys, Arg, Asp, Glu or Ser
  MISC_FEATURE (287)..(287): Xaa can be Gly, Ala, Val, Ile, Leu, Phe, Tyr, Trp, Lys, Arg, Asp, Glu or Ser
  MISC_FEATURE (292)..(292): Xaa can be Gly, Ala, Val, Ile, Leu, Phe, Tyr, Trp, Lys, Arg, Asp, Glu or Ser
  MISC_FEATURE (297)..(297): Xaa can be Gly, Ala, Val, Ile, Leu, Phe, Tyr, Trp, Lys, Arg, Asp, Glu or Ser
  MISC_FEATURE (302)..(302): Xaa can be Gly, Ala, Val, Ile, Leu, Phe, Tyr, Trp, Lys, Arg, Asp, Glu or Ser
  MISC_FEATURE (307)..(307): Xaa can be Gly, Ala, Val, Ile, Leu, Phe, Tyr, Trp, Lys, Arg, Asp, Glu or Ser
  MISC_FEATURE (312)..(312): Xaa can be Gly, Ala, Val, Ile, Leu, Phe, Tyr, Trp, Lys, Arg, Asp, Glu or Ser
  MISC_FEATURE (317)..(317): Xaa can be Gly, Ala, Val, Ile, Leu, Phe, Tyr, Trp, Lys, Arg, Asp, Glu or Ser
  MISC_FEATURE (322)..(322): Xaa can be Gly, Ala, Val, Ile, Leu, Phe, Tyr, Trp, Lys, Arg, Asp, Glu or Ser
  MISC_FEATURE (327)..(327): Xaa can be Gly, Ala, Val, Ile, Leu, Phe, Tyr, Trp, Lys, Arg, Asp, Glu or Ser
  MISC_FEATURE (332)..(332): Xaa can be Gly, Ala, Val, Ile, Leu, Phe, Tyr, Trp, Lys, Arg, Asp, Glu or Ser
  MISC_FEATURE (337)..(337): Xaa can be Gly, Ala, Val, Ile, Leu, Phe, Tyr, Trp, Lys, Arg, Asp, Glu or Ser
  MISC_FEATURE (342)..(342): Xaa can be Gly, Ala, Val, Ile, Leu, Phe, Tyr, Trp, Lys, Arg, Asp, Glu or Ser
  MISC_FEATURE (347)..(347): Xaa can be Gly, Ala, Val, Ile, Leu, Phe, Tyr, Trp, Lys, Arg, Asp, Glu or Ser
  MISC_FEATURE (352)..(352): Xaa can be Gly, Ala, Val, Ile, Leu, Phe, Tyr, Trp, Lys, Arg, Asp, Glu or Ser
  MISC_FEATURE (357)..(357): Xaa can be Gly, Ala, Val, Ile, Leu, Phe, Tyr, Trp, Lys, Arg, Asp, Glu or Ser
  MISC_FEATURE (362)..(362): Xaa can be Gly, Ala, Val, Ile, Leu, Phe, Tyr, Trp, Lys, Arg, Asp, Glu or Ser
  MISC_FEATURE (367)..(367): Xaa can be Gly, Ala, Val, Ile, Leu, Phe, Tyr, Trp, Lys, Arg, Asp, Glu or Ser
  MISC_FEATURE (372)..(372): Xaa can be Gly, Ala, Val, Ile, Leu, Phe, Tyr, Trp, Lys, Arg, Asp, Glu or Ser
  MISC_FEATURE (377)..(377): Xaa can be Gly, Ala, Val, Ile, Leu, Phe, Tyr, Trp, Lys, Arg, Asp, Glu or Ser
  MISC_FEATURE (382)..(382): Xaa can be Gly, Ala, Val, Ile, Leu, Phe, Tyr, Trp, Lys, Arg, Asp, Glu or Ser
  MISC_FEATURE (387)..(387): Xaa can be Gly, Ala, Val, Ile, Leu, Phe, Tyr, Trp, Lys, Arg, Asp, Glu or Ser
  MISC_FEATURE (392)..(392): Xaa can be Gly, Ala, Val, Ile, Leu, Phe, Tyr, Trp, Lys, Arg, Asp, Glu or Ser
  MISC_FEATURE (397)..(397): Xaa can be Gly, Ala, Val, Ile, Leu, Phe, Tyr, Trp, Lys, Arg, Asp, Glu or Ser
  MISC_FEATURE (402)..(402): Xaa can be Gly, Ala, Val, Ile, Leu, Phe, Tyr, Trp, Lys, Arg, Asp, Glu or Ser
  MISC_FEATURE (407)..(407): Xaa can be Gly, Ala, Val, Ile, Leu, Phe, Tyr, Trp, Lys, Arg, Asp, Glu or Ser
  MISC_FEATURE (412)..(412): Xaa can be Gly, Ala, Val, Ile, Leu, Phe, Tyr, Trp, Lys, Arg, Asp, Glu or Ser
  MISC_FEATURE (417)..(417): Xaa can be Gly, Ala, Val, Ile, Leu, Phe, Tyr, Trp, Lys, Arg, Asp, Glu or Ser
  MISC_FEATURE (422)..(422): Xaa can be Gly, Ala, Val, Ile, Leu, Phe, Tyr, Trp, Lys, Arg, Asp, Glu or Ser
  MISC_FEATURE (427)..(427): Xaa can be Gly, Ala, Val, Ile, Leu, Phe, Tyr, Trp, Lys, Arg, Asp, Glu or Ser
  MISC_FEATURE (432)..(432): Xaa can be Gly, Ala, Val, Ile, Leu, Phe, Tyr, Trp, Lys, Arg, Asp, Glu or Ser
  MISC_FEATURE (437)..(437): Xaa can be Gly, Ala, Val, Ile, Leu, Phe, Tyr, Trp, Lys, Arg, Asp, Glu or Ser
  MISC_FEATURE (442)..(442): Xaa can be Gly, Ala, Val, Ile, Leu, Phe, Tyr, Trp, Lys, Arg, Asp, Glu or Ser
  MISC_FEATURE (447)..(447): Xaa can be Gly, Ala, Val, Ile, Leu, Phe, Tyr, Trp, Lys, Arg, Asp, Glu or Ser
  MISC_FEATURE (452)..(452): Xaa can be Gly, Ala, Val, Ile, Leu, Phe, Tyr, Trp, Lys, Arg, Asp, Glu or Ser
  MISC_FEATURE (457)..(457): Xaa can be Gly, Ala, Val, Ile, Leu, Phe, Tyr, Trp, Lys, Arg, Asp, Glu or Ser
  MISC_FEATURE (462)..(462): Xaa can be Gly, Ala, Val, Ile, Leu, Phe, Tyr, Trp, Lys, Arg, Asp, Glu or Ser
  MISC_FEATURE (467)..(467): Xaa can be Gly, Ala, Val, Ile, Leu, Phe, Tyr, Trp, Lys, Arg, Asp, Glu or Ser
  MISC_FEATURE (472)..(472): Xaa can be Gly, Ala, Val, Ile, Leu, Phe, Tyr, Trp, Lys, Arg, Asp, Glu or Ser
  MISC_FEATURE (477)..(477): Xaa can be Gly, Ala, Val, Ile, Leu, Phe, Tyr, Trp, Lys, Arg, Asp, Glu or Ser
  MISC_FEATURE (482)..(482): Xaa can be Gly, Ala, Val, Ile, Leu, Phe, Tyr, Trp, Lys, Arg, Asp, Glu or Ser
  MISC_FEATURE (487)..(487): Xaa can be Gly, Ala, Val, Ile, Leu, Phe, Tyr, Trp, Lys, Arg, Asp, Glu or Ser
  MISC_FEATURE (492)..(492): Xaa can be Gly, Ala, Val, Ile, Leu, Phe, Tyr, Trp, Lys, Arg, Asp, Glu or Ser
  MISC_FEATURE (497)..(497): Xaa can be Gly, Ala, Val, Ile, Leu, Phe, Tyr, Trp, Lys, Arg, Asp, Glu or Ser
  MISC_FEATURE (502)..(502): Xaa can be Gly, Ala, Val, Ile, Leu, Phe, Tyr, Trp, Lys, Arg, Asp, Glu or Ser
  MISC_FEATURE (507)..(507): Xaa can be Gly, Ala, Val, Ile, Leu, Phe, Tyr, Trp, Lys, Arg, Asp, Glu or Ser
  MISC_FEATURE (512)..(512): Xaa can be Gly, Ala, Val, Ile, Leu, Phe, Tyr, Trp, Lys, Arg, Asp, Glu or Ser
  MISC_FEATURE (517)..(517): Xaa can be Gly, Ala, Val, Ile, Leu, Phe, Tyr, Trp, Lys, Arg, Asp, Glu or Ser
  MISC_FEATURE (522)..(522): Xaa can be Gly, Ala, Val, Ile, Leu, Phe, Tyr, Trp, Lys, Arg, Asp, Glu or Ser
  MISC_FEATURE (527)..(527): Xaa can be Gly, Ala, Val, Ile, Leu, Phe, Tyr, Trp, Lys, Arg, Asp, Glu or Ser
  MISC_FEATURE (532)..(532): Xaa can be Gly, Ala, Val, Ile, Leu, Phe, Tyr, Trp, Lys, Arg, Asp, Glu or Ser
  MISC_FEATURE (537)..(537): Xaa can be Gly, Ala, Val, Ile, Leu, Phe, Tyr, Trp, Lys, Arg, Asp, Glu or Ser
  MISC_FEATURE (542)..(542): Xaa can be Gly, Ala, Val, Ile, Leu, Phe, Tyr, Trp, Lys, Arg, Asp, Glu or Ser
  MISC_FEATURE (547)..(547): Xaa can be Gly, Ala, Val, Ile, Leu, Phe, Tyr, Trp, Lys, Arg, Asp, Glu or Ser
  MISC_FEATURE (552)..(552): Xaa can be Gly, Ala, Val, Ile, Leu, Phe, Tyr, Trp, Lys, Arg, Asp, Glu or Ser
  MISC_FEATURE (557)..(557): Xaa can be Gly, Ala, Val, Ile, Leu, Phe, Tyr, Trp, Lys, Arg, Asp, Glu or Ser
  MISC_FEATURE (562)..(562): Xaa can be Gly, Ala, Val, Ile, Leu, Phe, Tyr, Trp, Lys, Arg, Asp, Glu or Ser
  MISC_FEATURE (567)..(567): Xaa can be Gly, Ala, Val, Ile, Leu, Phe, Tyr, Trp, Lys, Arg, Asp, Glu or Ser
  MISC_FEATURE (572)..(572): Xaa can be Gly, Ala, Val, Ile, Leu, Phe, Tyr, Trp, Lys, Arg, Asp, Glu or Ser
  MISC_FEATURE (577)..(577): Xaa can be Gly, Ala, Val, Ile, Leu, Phe, Tyr, Trp, Lys, Arg, Asp, Glu or Ser
  MISC_FEATURE (582)..(582): Xaa can be Gly, Ala, Val, Ile, Leu, Phe, Tyr, Trp, Lys, Arg, Asp, Glu or Ser
  MISC_FEATURE (587)..(587): Xaa can be Gly, Ala, Val, Ile, Leu, Phe, Tyr, Trp, Lys, Arg, Asp, Glu or Ser
  MISC_FEATURE (592)..(592): Xaa can be Gly, Ala, Val, Ile, Leu, Phe, Tyr, Trp, Lys, Arg, Asp, Glu or Ser
  MISC_FEATURE (597)..(597): Xaa can be Gly, Ala, Val, Ile, Leu, Phe, Tyr, Trp, Lys, Arg, Asp, Glu or Ser
  MISC_FEATURE (602)..(602): Xaa can be Gly, Ala, Val, Ile, Leu, Phe, Tyr, Trp, Lys, Arg, Asp, Glu or Ser
  MISC_FEATURE (607)..(607): Xaa can be Gly, Ala, Val, Ile, Leu, Phe, Tyr, Trp, Lys, Arg, Asp, Glu or Ser
  MISC_FEATURE (612)..(612): Xaa can be Gly, Ala, Val, Ile, Leu, Phe, Tyr, Trp, Lys, Arg, Asp, Glu or Ser
  MISC_FEATURE (617)..(617): Xaa can be Gly, Ala, Val, Ile, Leu, Phe, Tyr, Trp, Lys, Arg, Asp, Glu or Ser
  MISC_FEATURE (622)..(622): Xaa can be Gly, Ala, Val, Ile, Leu, Phe, Tyr, Trp, Lys, Arg, Asp, Glu or Ser
  MISC_FEATURE (627)..(627): Xaa can be Gly, Ala, Val, Ile, Leu, Phe, Tyr, Trp, Lys, Arg, Asp, Glu or Ser
  MISC_FEATURE (632)..(632): Xaa can be Gly, Ala, Val, Ile, Leu, Phe, Tyr, Trp, Lys, Arg, Asp, Glu or Ser
  MISC_FEATURE (637)..(637): Xaa can be Gly, Ala, Val, Ile, Leu, Phe, Tyr, Trp, Lys, Arg, Asp, Glu or Ser
  MISC_FEATURE (642)..(642): Xaa can be Gly, Ala, Val, Ile, Leu, Phe, Tyr, Trp, Lys, Arg, Asp, Glu or Ser
  MISC_FEATURE (647)..(647): Xaa can be Gly, Ala, Val, Ile, Leu, Phe, Tyr, Trp, Lys, Arg, Asp, Glu or Ser
  MISC_FEATURE (652)..(652): Xaa can be Gly, Ala, Val, Ile, Leu, Phe, Tyr, Trp, Lys, Arg, Asp, Glu or Ser
  MISC_FEATURE (657)..(657): Xaa can be Gly, Ala, Val, Ile, Leu, Phe, Tyr, Trp, Lys, Arg, Asp, Glu or Ser
  MISC_FEATURE (662)..(662): Xaa can be Gly, Ala, Val, Ile, Leu, Phe, Tyr, Trp, Lys, Arg, Asp, Glu or Ser
  MISC_FEATURE (667)..(667): Xaa can be Gly, Ala, Val, Ile, Leu, Phe, Tyr, Trp, Lys, Arg, Asp, Glu or Ser
  MISC_FEATURE (672)..(672): Xaa can be Gly, Ala, Val, Ile, Leu, Phe, Tyr, Trp, Lys, Arg, Asp, Glu or Ser
  MISC_FEATURE (677)..(677): Xaa can be Gly, Ala, Val, Ile, Leu, Phe, Tyr, Trp, Lys, Arg, Asp, Glu or Ser
  MISC_FEATURE (682)..(682): Xaa can be Gly, Ala, Val, Ile, Leu, Phe, Tyr, Trp, Lys, Arg, Asp, Glu or Ser
  MISC_FEATURE (687)..(687): Xaa can be Gly, Ala, Val, Ile, Leu, Phe, Tyr, Trp, Lys, Arg, Asp, Glu or Ser
  MISC_FEATURE (692)..(692): Xaa can be Gly, Ala, Val, Ile, Leu, Phe, Tyr, Trp, Lys, Arg, Asp, Glu or Ser
  MISC_FEATURE (697)..(697): Xaa can be Gly, Ala, Val, Ile, Leu, Phe, Tyr, Trp, Lys, Arg, Asp, Glu or Ser
  MISC_FEATURE (702)..(702): Xaa can be Gly, Ala, Val, Ile, Leu, Phe, Tyr, Trp, Lys, Arg, Asp, Glu or Ser
  MISC_FEATURE (707)..(707): Xaa can be Gly, Ala, Val, Ile, Leu, Phe, Tyr, Trp, Lys, Arg, Asp, Glu or Ser
  MISC_FEATURE (712)..(712): Xaa can be Gly, Ala, Val, Ile, Leu, Phe, Tyr, Trp, Lys, Arg, Asp, Glu or Ser
  MISC_FEATURE (717)..(717): Xaa can be Gly, Ala, Val, Ile, Leu, Phe, Tyr, Trp, Lys, Arg, Asp, Glu or Ser
  MISC_FEATURE (722)..(722): Xaa can be Gly, Ala, Val, Ile, Leu, Phe, Tyr, Trp, Lys, Arg, Asp, Glu or Ser
  MISC_FEATURE (727)..(727): Xaa can be Gly, Ala, Val, Ile, Leu, Phe, Tyr, Trp, Lys, Arg, Asp, Glu or Ser
  MISC_FEATURE (732)..(732): Xaa can be Gly, Ala, Val, Ile, Leu, Phe, Tyr, Trp, Lys, Arg, Asp, Glu or Ser
  MISC_FEATURE (737)..(737): Xaa can be Gly, Ala, Val, Ile, Leu, Phe, Tyr, Trp, Lys, Arg, Asp, Glu or Ser
  MISC_FEATURE (742)..(742): Xaa can be Gly, Ala, Val, Ile, Leu, Phe, Tyr, Trp, Lys, Arg, Asp, Glu or Ser
  MISC_FEATURE (747)..(747): Xaa can be Gly, Ala, Val, Ile, Leu, Phe, Tyr, Trp, Lys, Arg, Asp, Glu or Ser
  MISC_FEATURE (752)..(752): Xaa can be Gly, Ala, Val, Ile, Leu, Phe, Tyr, Trp, Lys, Arg, Asp, Glu or Ser
  MISC_FEATURE (757)..(757): Xaa can be Gly, Ala, Val, Ile, Leu, Phe, Tyr, Trp, Lys, Arg, Asp, Glu or Ser
  MISC_FEATURE (762)..(762): Xaa can be Gly, Ala, Val, Ile, Leu, Phe, Tyr, Trp, Lys, Arg, Asp, Glu or Ser
  MISC_FEATURE (767)..(767): Xaa can be Gly, Ala, Val, Ile, Leu, Phe, Tyr, Trp, Lys, Arg, Asp, Glu or Ser
  MISC_FEATURE (772)..(772): Xaa can be Gly, Ala, Val, Ile, Leu, Phe, Tyr, Trp, Lys, Arg, Asp, Glu or Ser
  MISC_FEATURE (777)..(777): Xaa can be Gly, Ala, Val, Ile, Leu, Phe, Tyr, Trp, Lys, Arg, Asp, Glu or Ser
  MISC_FEATURE (782)..(782): Xaa can be Gly, Ala, Val, Ile, Leu, Phe, Tyr, Trp, Lys, Arg, Asp, Glu or Ser
  MISC_FEATURE (787)..(787): Xaa can be Gly, Ala, Val, Ile, Leu, Phe, Tyr, Trp, Lys, Arg, Asp, Glu or Ser
  MISC_FEATURE (792)..(792): Xaa can be Gly, Ala, Val, Ile, Leu, Phe, Tyr, Trp, Lys, Arg, Asp, Glu or Ser
  MISC_FEATURE (797)..(797): Xaa can be Gly, Ala, Val, Ile, Leu, Phe, Tyr, Trp, Lys, Arg, Asp, Glu or Ser
GXGVPGXGVPGXGVPGXGVPGXGVPGXGVPGXGVPGXGVPGXGVPGXGVPGXGVPGXGVPGXGVPGXGVPGXGVPGXGVPGXGVPGXGVPGXGVPGXGVPGXGVPGXGVPGXGVPGXGVPGXGVPGXGVPGXGVPGXGVPGXGVPGXGVPGXGVPGXGVPGXGVPGXGVPGXGVPGXGVPGXGVPGXGVPGXGVPGXGVPGXGVPGXGVPGXGVPGXGVPGXGVPGXGVPGXGVPGXGVPGXGVPGXGVPGXGVPGXGVPGXGVPGXGVPGXGVPGXGVPGXGVPGXGVPGXGVPGXGVPGXGVPGXGVPGXGVPGXGVPGXGVPGXGVPGXGVPGXGVPGXGVPGXGVPGXGVPGXGVPGXGVPGXGVPGXGVPGXGVPGXGVPGXGVPGXGVPGXGVPGXGVPGXGVPGXGVPGXGVPGXGVPGXGVPGXGVPGXGVPGXGVPGXGVPGXGVPGXGVPGXGVPGXGVPGXGVPGXGVPGXGVPGXGVPGXGVPGXGVPGXGVPGXGVPGXGVPGXGVPGXGVPGXGVPGXGVPGXGVPGXGVPGXGVPGXGVPGXGVPGXGVPGXGVPGXGVPGXGVPGXGVPGXGVPGXGVPGXGVPGXGVPGXGVPGXGVPGXGVPGXGVPGXGVPGXGVPGXGVPGXGVPGXGVPGXGVPGXGVPGXGVPGXGVPGXGVPGXGVPGXGVPGXGVPGXGVPGXGVPGXGVPGXGVPGXGVPGXGVPGXGVPGXGVPGXGVPGXGVPGXGVPGXGVPGXGVPGXGVPGXGVPGXGVPGXGVPGXGVPGXGVPGXGVPGXGVPGXGVP

SEQ ID NO: 148 - protein, 1440 aa, Artificial Sequence
  elastin-like polypeptide
  MISC_FEATURE (1)..(1): Xaa can be any naturally occurring amino acid
  MISC_FEATURE (2)..(2): Xaa can be any naturally occurring amino acid
  MISC_FEATURE (4)..(4): Xaa can be any naturally occurring amino acid except Pro or Gly
  MISC_FEATURE (5)..(5): Xaa can be any naturally occurring amino acid except Pro or Gly
  MISC_FEATURE (6)..(6): Xaa can be any naturally occurring amino acid except Pro or Gly
  MISC_FEATURE (7)..(7): Xaa can be any naturally occurring amino acid except Pro or Gly
  MISC_FEATURE (9)..(9): Xaa can be any naturally occurring amino acid
  MISC_FEATURE (10)..(10): Xaa can be any naturally occurring amino acid
  MISC_FEATURE (11)..(11): Xaa can be any naturally occurring amino acid
  MISC_FEATURE (13)..(13): Xaa can be any naturally occurring amino acid except Pro or Gly
  MISC_FEATURE (14)..(14): Xaa can be any naturally occurring amino acid except Pro or Gly
  MISC_FEATURE (15)..(15): Xaa can be any naturally occurring amino acid except Pro or Gly
  MISC_FEATURE (16)..(16): Xaa can be any naturally occurring amino acid except Pro or Gly
  MISC_FEATURE (18)..(18): Xaa can be any naturally occurring amino acid
  MISC_FEATURE (19)..(19): Xaa can be any naturally occurring amino acid
  MISC_FEATURE (20)..(20): Xaa can be any naturally occurring amino acid
  MISC_FEATURE (22)..(22): Xaa can be any naturally occurring amino acid except Pro or Gly
  MISC_FEATURE (23)..(23): Xaa can be any naturally occurring amino acid except Pro or Gly
  MISC_FEATURE (24)..(24): Xaa can be any naturally occurring amino acid except Pro or Gly
  MISC_FEATURE (25)..(25): Xaa can be any naturally occurring amino acid except Pro or Gly
  MISC_FEATURE (27)..(27): Xaa can be any naturally occurring amino acid
  MISC_FEATURE (28)..(28): Xaa can be any naturally occurring amino acid
  MISC_FEATURE (29)..(29): Xaa can be any naturally occurring amino acid
  MISC_FEATURE (31)..(31): Xaa can be any naturally occurring amino acid except Pro or Gly
  MISC_FEATURE (32)..(32): Xaa can be any naturally occurring amino acid except Pro or Gly
  MISC_FEATURE (33)..(33): Xaa can be any naturally occurring amino acid except Pro or Gly
  MISC_FEATURE (34)..(34): Xaa can be any naturally occurring amino acid except Pro or Gly
  MISC_FEATURE (36)..(36): Xaa can be any naturally occurring amino acid
  MISC_FEATURE (37)..(37): Xaa can be any naturally occurring amino acid
  MISC_FEATURE (38)..(38): Xaa can be any naturally occurring amino acid
  MISC_FEATURE (40)..(40): Xaa can be any naturally occurring amino acid except Pro or Gly
  MISC_FEATURE (41)..(41): Xaa can be any naturally occurring amino acid except Pro or Gly
  MISC_FEATURE (42)..(42): Xaa can be any naturally occurring amino acid except Pro or Gly
  MISC_FEATURE (43)..(43): Xaa can be any naturally occurring amino acid except Pro or Gly
  MISC_FEATURE (45)..(45): Xaa can be any naturally occurring amino acid
  MISC_FEATURE (46)..(46): Xaa can be any naturally occurring amino acid
  MISC_FEATURE (47)..(47): Xaa can be any naturally occurring amino acid
  MISC_FEATURE (49)..(49): Xaa can be any naturally occurring amino acid except Pro or Gly
  MISC_FEATURE (50)..(50): Xaa can be any naturally occurring amino acid except Pro or Gly
  MISC_FEATURE (51)..(51): Xaa can be any naturally occurring amino acid except Pro or Gly
  MISC_FEATURE (52)..(52): Xaa can be any naturally occurring amino acid except Pro or Gly
  MISC_FEATURE (54)..(54): Xaa can be any naturally occurring amino acid
  MISC_FEATURE (55)..(55): Xaa can be any naturally occurring amino acid
  MISC_FEATURE (56)..(56): Xaa can be any naturally occurring amino acid
  MISC_FEATURE (58)..(58): Xaa can be any naturally occurring amino acid except Pro or Gly
  MISC_FEATURE (59)..(59): Xaa can be any naturally occurring amino acid except Pro or Gly
  MISC_FEATURE (60)..(60): Xaa can be any naturally occurring amino acid except Pro or Gly
  MISC_FEATURE (61)..(61): Xaa can be any naturally occurring amino acid except Pro or Gly
  MISC_FEATURE (63)..(63): Xaa can be any naturally occurring amino acid
  MISC_FEATURE (64)..(64): Xaa can be any naturally occurring amino acid
  MISC_FEATURE (65)..(65): Xaa can be any naturally occurring amino acid
  MISC_FEATURE (67)..(67): Xaa can be any naturally occurring amino acid except Pro or Gly
  MISC_FEATURE (68)..(68): Xaa can be any naturally occurring amino acid except Pro or Gly
  MISC_FEATURE (69)..(69): Xaa can be any naturally occurring amino acid except Pro or Gly
  MISC_FEATURE (70)..(70): Xaa can be any naturally occurring amino acid except Pro or Gly
  MISC_FEATURE (72)..(72): Xaa can be any naturally occurring amino acid
  MISC_FEATURE (73)..(73): Xaa can be any naturally occurring amino acid
  MISC_FEATURE (74)..(74): Xaa can be any naturally occurring amino acid
  MISC_FEATURE (76)..(76): Xaa can be any naturally occurring amino acid except Pro or Gly
  MISC_FEATURE (77)..(77): Xaa can be any naturally occurring amino acid except Pro or Gly
  MISC_FEATURE (78)..(78): Xaa can be any naturally occurring amino acid except Pro or Gly
  MISC_FEATURE (79)..(79): Xaa can be any naturally occurring amino acid except Pro or Gly
  MISC_FEATURE (81)..(81): Xaa can be any naturally occurring amino acid
  MISC_FEATURE (82)..(82): Xaa can be any naturally occurring amino acid
  MISC_FEATURE (83)..(83): Xaa can be any naturally occurring amino acid
  MISC_FEATURE (85)..(85): Xaa can be any naturally occurring amino acid except Pro or Gly
  MISC_FEATURE (86)..(86): Xaa can be any naturally occurring amino acid except Pro or Gly
  MISC_FEATURE (87)..(87): Xaa can be any naturally occurring amino acid except Pro or Gly
  MISC_FEATURE (88)..(88): Xaa can be any naturally occurring amino acid except Pro or Gly
  MISC_FEATURE (90)..(90): Xaa can be any naturally occurring amino acid
  MISC_FEATURE (91)..(1440): May be present or absent in groups of the repeat unit Xaa Xaa Pro Xaa Xaa Xaa Xaa Gly Xaa
  MISC_FEATURE (91)..(91): Xaa can be any naturally occurring amino acid
  MISC_FEATURE (92)..(92): Xaa can be any naturally occurring amino acid
  MISC_FEATURE (94)..(94): Xaa can be any naturally occurring amino acid except Pro or Gly
  MISC_FEATURE (95)..(95): Xaa can be any naturally occurring amino acid except Pro or Gly
  MISC_FEATURE (96)..(96): Xaa can be any naturally occurring amino acid except Pro or Gly
  MISC_FEATURE (97)..(97): Xaa can be any naturally occurring amino acid except Pro or Gly
  MISC_FEATURE (99)..(99): Xaa can be any naturally occurring amino acid
  MISC_FEATURE (100)..(100): Xaa can be any naturally occurring amino acid
  MISC_FEATURE (101)..(101): Xaa can be any naturally occurring amino acid
  MISC_FEATURE (103)..(103): Xaa can be any naturally occurring amino acid except Pro or Gly
  MISC_FEATURE (104)..(104): Xaa can be any naturally occurring amino acid except Pro or Gly
  MISC_FEATURE (105)..(105): Xaa can be any naturally occurring amino acid except Pro or Gly
  MISC_FEATURE (106)..(106): Xaa can be any naturally occurring amino acid except Pro or Gly
  MISC_FEATURE (108)..(108): Xaa can be any naturally occurring amino acid
  MISC_FEATURE (109)..(109): Xaa can be any naturally occurring amino acid
  MISC_FEATURE (110)..(110): Xaa can be any naturally occurring amino acid
  MISC_FEATURE (112)..(112): Xaa can be any naturally occurring amino acid except Pro or Gly
  MISC_FEATURE (113)..(113): Xaa can be any naturally occurring amino acid except Pro or Gly
  MISC_FEATURE (114)..(114): Xaa can be any naturally occurring amino acid except Pro or Gly
  MISC_FEATURE (115)..(115): Xaa can be any naturally occurring amino acid except Pro or Gly
  MISC_FEATURE (117)..(117): Xaa can be any naturally occurring amino acid
  MISC_FEATURE (118)..(118): Xaa can be any naturally occurring amino acid
  MISC_FEATURE (119)..(119): Xaa can be any naturally occurring amino acid
  MISC_FEATURE (121)..(121): Xaa can be any naturally occurring amino acid except Pro or Gly
  MISC_FEATURE (122)..(122): Xaa can be any naturally occurring amino acid except Pro or Gly
  MISC_FEATURE (123)..(123): Xaa can be any naturally occurring amino acid except Pro or Gly
  MISC_FEATURE (124)..(124): Xaa can be any naturally occurring amino acid except Pro or Gly
  MISC_FEATURE (126)..(126): Xaa can be any naturally occurring amino acid
  MISC_FEATURE (127)..(127): Xaa can be any naturally occurring amino acid
  MISC_FEATURE (128)..(128): Xaa can be any naturally occurring amino acid
  MISC_FEATURE (130)..(130): Xaa can be any naturally occurring amino acid except Pro or Gly
  MISC_FEATURE (131)..(131): Xaa can be any naturally occurring amino acid except Pro or Gly
  MISC_FEATURE (132)..(132): Xaa can be any naturally occurring amino acid except Pro or Gly
  MISC_FEATURE (133)..(133): Xaa can be any naturally occurring amino acid except Pro or Gly
  MISC_FEATURE (135)..(135): Xaa can be any naturally occurring amino acid
  MISC_FEATURE (136)..(136): Xaa can be any naturally occurring amino acid
  MISC_FEATURE (137)..(137): Xaa can be any naturally occurring amino acid
  MISC_FEATURE (139)..(139): Xaa can be any naturally occurring amino acid except Pro or Gly
  MISC_FEATURE (140)..(140): Xaa can be any naturally occurring amino acid except Pro or Gly
  MISC_FEATURE (141)..(141): Xaa can be any naturally occurring amino acid except Pro or Gly
  MISC_FEATURE (142)..(142): Xaa can be any naturally occurring amino acid except Pro or Gly
  MISC_FEATURE (144)..(144): Xaa can be any naturally occurring amino acid
  MISC_FEATURE (145)..(145): Xaa can be any naturally occurring amino acid
  MISC_FEATURE (146)..(146): Xaa can be any naturally occurring amino acid
  MISC_FEATURE (148)..(148): Xaa can be any naturally occurring amino acid except Pro or Gly
  MISC_FEATURE (149)..(149): Xaa can be any naturally occurring amino acid except Pro or Gly
  MISC_FEATURE (150)..(150): Xaa can be any naturally occurring amino acid except Pro or Gly
  MISC_FEATURE (151)..(151): Xaa can be any naturally occurring amino acid except Pro or Gly
  MISC_FEATURE (153)..(153): Xaa can be any naturally occurring amino acid
  MISC_FEATURE (154)..(154): Xaa can be any naturally occurring amino acid
  MISC_FEATURE (155)..(155): Xaa can be any naturally occurring amino acid
  MISC_FEATURE (157)..(157): Xaa can be any naturally occurring amino acid except Pro or Gly
  MISC_FEATURE (158)..(158): Xaa can be any naturally occurring amino acid except Pro or Gly
  MISC_FEATURE (159)..(159): Xaa can be any naturally occurring amino acid except Pro or Gly
  MISC_FEATURE (160)..(160): Xaa can be any naturally occurring amino acid except Pro or Gly
  MISC_FEATURE (162)..(162): Xaa can be any naturally occurring amino acid
  MISC_FEATURE (163)..(163): Xaa can be any naturally occurring amino acid
  MISC_FEATURE (164)..(164): Xaa can be any naturally occurring amino acid
  MISC_FEATURE (166)..(166): Xaa can be any naturally occurring amino acid except Pro or Gly
  MISC_FEATURE (167)..(167): Xaa can be any naturally occurring amino acid except Pro or Gly
  MISC_FEATURE (168)..(168): Xaa can be any naturally occurring amino acid except Pro or Gly
  MISC_FEATURE (169)..(169): Xaa can be any naturally occurring amino acid except Pro or Gly
  MISC_FEATURE (171)..(171): Xaa can be any naturally occurring amino acid
  MISC_FEATURE (172)..(172): Xaa can be any naturally occurring amino acid
  MISC_FEATURE (173)..(173): Xaa can be any naturally occurring amino acid
  MISC_FEATURE (175)..(175): Xaa can be any naturally occurring amino acid except Pro or Gly
  MISC_FEATURE (176)..(176): Xaa can be any naturally occurring amino acid except Pro or Gly
  MISC_FEATURE (177)..(177): Xaa can be any naturally occurring amino acid except Pro or Gly
  MISC_FEATURE (178)..(178): Xaa can be any naturally occurring amino acid except Pro or Gly
  MISC_FEATURE (180)..(180): Xaa can be any naturally occurring amino acid
  MISC_FEATURE (181)..(181): Xaa can be any naturally occurring amino acid
  MISC_FEATURE (182)..(182): Xaa can be any naturally occurring amino acid
  MISC_FEATURE (184)..(184): Xaa can be any naturally occurring amino acid except Pro or Gly
  MISC_FEATURE (185)..(185): Xaa can be any naturally occurring amino acid except Pro or Gly
  MISC_FEATURE (186)..(186): Xaa can be any naturally occurring amino acid except Pro or Gly
  MISC_FEATURE (187)..(187): Xaa can be any naturally occurring amino acid except Pro or Gly
  MISC_FEATURE (189)..(189): Xaa can be any naturally occurring amino acid
  MISC_FEATURE (190)..(190): Xaa can be any naturally occurring amino acid
  MISC_FEATURE (191)..(191): Xaa can be any naturally occurring amino acid
  MISC_FEATURE (193)..(193): Xaa can be any naturally occurring amino acid except Pro or Gly
  MISC_FEATURE (194)..(194): Xaa can be any naturally occurring amino acid except Pro or Gly
  MISC_FEATURE (195)..(195): Xaa can be any naturally occurring amino acid except Pro or Gly
  MISC_FEATURE (196)..(196): Xaa can be any naturally occurring amino acid except Pro or Gly
  MISC_FEATURE (198)..(198): Xaa can be any naturally occurring amino acid
  MISC_FEATURE (199)..(199): Xaa can be any naturally occurring amino acid
  MISC_FEATURE (200)..(200): Xaa can be any naturally occurring amino acid
  MISC_FEATURE (202)..(202): Xaa can be any naturally occurring amino acid except Pro or Gly
  MISC_FEATURE (203)..(203): Xaa can be any naturally occurring amino acid except Pro or Gly
  MISC_FEATURE (204)..(204): Xaa can be any naturally occurring amino acid except Pro or Gly
  MISC_FEATURE (205)..(205): Xaa can be any naturally occurring amino acid except Pro or Gly
  MISC_FEATURE (207)..(207): Xaa can be any naturally occurring amino acid
  MISC_FEATURE (208)..(208): Xaa can be any naturally occurring amino acid
  MISC_FEATURE (209)..(209): Xaa can be any naturally occurring amino acid
  MISC_FEATURE (211)..(211): Xaa can be any naturally occurring amino acid except Pro or Gly
  MISC_FEATURE (212)..(212): Xaa can be any naturally occurring amino acid except Pro or Gly
  MISC_FEATURE (213)..(213): Xaa can be any naturally occurring amino acid except Pro or Gly
  MISC_FEATURE (214)..(214): Xaa can be any naturally occurring amino acid except Pro or Gly
  MISC_FEATURE (216)..(216): Xaa can be any naturally occurring amino acid
  MISC_FEATURE (217)..(217): Xaa can be any naturally occurring amino acid
  MISC_FEATURE (218)..(218): Xaa can be any naturally occurring amino acid
  MISC_FEATURE (220)..(220): Xaa can be any naturally occurring amino acid except Pro or Gly
  MISC_FEATURE (221)..(221): Xaa can be any naturally occurring amino acid except Pro or Gly
  MISC_FEATURE (222)..(222): Xaa can be any naturally occurring amino acid except Pro or Gly
  MISC_FEATURE (223)..(223): Xaa can be any naturally occurring amino acid except Pro or Gly
  MISC_FEATURE (225)..(225): Xaa can be any naturally occurring amino acid
  MISC_FEATURE (226)..(226): Xaa can be any naturally occurring amino acid
  MISC_FEATURE (227)..(227): Xaa can be any naturally occurring amino acid
  MISC_FEATURE (229)..(229): Xaa can be any naturally occurring amino acid except Pro or Gly
  MISC_FEATURE (230)..(230): Xaa can be any naturally occurring amino acid except Pro or Gly
  MISC_FEATURE (231)..(231): Xaa can be any naturally occurring amino acid except Pro or Gly
  MISC_FEATURE (232)..(232): Xaa can be any naturally occurring amino acid except Pro or Gly
  MISC_FEATURE (234)..(234): Xaa can be any naturally occurring amino acid
  MISC_FEATURE (235)..(235): Xaa can be any naturally occurring amino acid
  MISC_FEATURE (236)..(236): Xaa can be any naturally occurring amino acid
  MISC_FEATURE (238)..(238): Xaa can be any naturally occurring amino acid except Pro or Gly
  MISC_FEATURE (239)..(239): Xaa can be any naturally occurring amino acid except Pro or Gly
  MISC_FEATURE (240)..(240): Xaa can be any naturally occurring amino acid except Pro or Gly
  MISC_FEATURE (241)..(241): Xaa can be any naturally occurring amino acid except Pro or Gly
  MISC_FEATURE (243)..(243): Xaa can be any naturally occurring amino acid
  MISC_FEATURE (244)..(244): Xaa can be any naturally occurring amino acid
  MISC_FEATURE (245)..(245): Xaa can be any naturally occurring amino acid
  MISC_FEATURE (247)..(247): Xaa can be any naturally occurring amino acid except Pro or Gly
  MISC_FEATURE (248)..(248): Xaa can be any naturally occurring amino acid except Pro or Gly
  MISC_FEATURE (249)..(249): Xaa can be any naturally occurring amino acid except Pro or Gly
  MISC_FEATURE (250)..(250): Xaa can be any naturally occurring amino acid except Pro or Gly
  MISC_FEATURE (252)..(252): Xaa can be any naturally occurring amino acid
  MISC_FEATURE (253)..(253): Xaa can be any naturally occurring amino acid
  MISC_FEATURE (254)..(254): Xaa can be any naturally occurring amino acid
  MISC_FEATURE (256)..(256): Xaa can be any naturally occurring amino acid except Pro or Gly
  MISC_FEATURE (257)..(257): Xaa can be any naturally occurring amino acid except Pro or Gly
  MISC_FEATURE (258)..(258): Xaa can be any naturally occurring amino acid except Pro or Gly
  MISC_FEATURE (259)..(259): Xaa can be any naturally occurring amino acid except Pro or Gly
  MISC_FEATURE (261)..(261): Xaa can be any naturally occurring amino acid
  MISC_FEATURE (262)..(262): Xaa can be any naturally occurring amino acid
  MISC_FEATURE (263)..(263): Xaa can be any naturally occurring amino acid
  MISC_FEATURE (265)..(265): Xaa can be any naturally occurring amino acid except Pro or Gly
  MISC_FEATURE (266)..(266): Xaa can be any naturally occurring amino acid except Pro or Gly
  MISC_FEATURE (267)..(267): Xaa can be any naturally occurring amino acid except Pro or Gly
  MISC_FEATURE (268)..(268): Xaa can be any naturally occurring amino acid except Pro or Gly
  MISC_FEATURE (270)..(270): Xaa can be any naturally occurring amino acid
  MISC_FEATURE (271)..(271): Xaa can be any naturally occurring amino acid
  MISC_FEATURE (272)..(272): Xaa can be any naturally occurring amino acid
  MISC_FEATURE (274)..(274): Xaa can be any naturally occurring amino acid except Pro or Gly
  MISC_FEATURE (275)..(275): Xaa can be any naturally occurring amino acid except Pro or Gly
  MISC_FEATURE (276)..(276): Xaa can be any naturally occurring amino acid except Pro or Gly
  MISC_FEATURE (277)..(277): Xaa can be any naturally occurring amino acid except Pro or Gly
  MISC_FEATURE (279)..(279): Xaa can be any naturally occurring amino acid
  MISC_FEATURE (280)..(280): Xaa can be any naturally occurring amino acid
  MISC_FEATURE (281)..(281): Xaa can be any naturally occurring amino acid
  MISC_FEATURE (283)..(283): Xaa can be any naturally occurring amino acid except Pro or Gly
  MISC_FEATURE (284)..(284): Xaa can be any naturally occurring amino acid except Pro or Gly
  MISC_FEATURE (285)..(285): Xaa can be any naturally occurring amino acid except Pro or Gly
  MISC_FEATURE (286)..(286): Xaa can be any naturally occurring amino acid except Pro or Gly
  MISC_FEATURE (288)..(288): Xaa can be any naturally occurring amino acid
  MISC_FEATURE (289)..(289): Xaa can be any naturally occurring amino acid
  MISC_FEATURE (290)..(290): Xaa can be any naturally occurring amino acid
  MISC_FEATURE (292)..(292): Xaa can be any naturally occurring amino acid except Pro or Gly
  MISC_FEATURE (293)..(293): Xaa can be any naturally occurring amino acid except Pro or Gly
  MISC_FEATURE (294)..(294): Xaa can be any naturally occurring amino acid except Pro or Gly
  MISC_FEATURE (295)..(295): Xaa can be any naturally occurring amino acid except Pro or Gly
  MISC_FEATURE (297)..(297): Xaa can be any naturally occurring amino acid
  MISC_FEATURE (298)..(298): Xaa can be any naturally occurring amino acid
  MISC_FEATURE (299)..(299): Xaa can be any naturally occurring amino acid
  MISC_FEATURE (301)..(301): Xaa can be any naturally occurring amino acid except Pro or Gly
  MISC_FEATURE (302)..(302): Xaa can be any naturally occurring amino acid except Pro or Gly
  MISC_FEATURE (303)..(303): Xaa can be any naturally occurring amino acid except Pro or Gly
  MISC_FEATURE (304)..(304): Xaa can be any naturally occurring amino acid except Pro or Gly
  MISC_FEATURE (306)..(306): Xaa can be any naturally occurring amino acid
  MISC_FEATURE (307)..(307): Xaa can be any naturally occurring amino acid
  MISC_FEATURE (308)..(308): Xaa can be any naturally occurring amino acid
  MISC_FEATURE (310)..(310): Xaa can be any naturally occurring amino acid except Pro or Gly
  MISC_FEATURE (311)..(311): Xaa can be any naturally occurring amino acid except Pro or Gly
  MISC_FEATURE (312)..(312): Xaa can be any naturally occurring amino acid except Pro or Gly
  MISC_FEATURE (313)..(313): Xaa can be any naturally occurring amino acid except Pro or Gly
  MISC_FEATURE (315)..(315): Xaa can be any naturally occurring amino acid
  MISC_FEATURE (316)..(316): Xaa can be any naturally occurring amino acid
  MISC_FEATURE (317)..(317): Xaa can be any naturally occurring amino acid
  MISC_FEATURE (319)..(319): Xaa can be any naturally occurring amino acid except Pro or Gly
  MISC_FEATURE (320)..(320): Xaa can be any naturally occurring amino acid except Pro or Gly
  MISC_FEATURE (321)..(321): Xaa can be any naturally occurring amino acid except Pro or Gly
  MISC_FEATURE (322)..(322): Xaa can be any naturally occurring amino acid except Pro or Gly
  MISC_FEATURE (324)..(324): Xaa can be any naturally occurring amino acid
  MISC_FEATURE (325)..(325): Xaa can be any naturally occurring amino acid
  MISC_FEATURE (326)..(326): Xaa can be any naturally occurring amino acid
  MISC_FEATURE (328)..(328): Xaa can be any naturally occurring amino acid except Pro or Gly
  MISC_FEATURE (329)..(329): Xaa can be any naturally occurring amino acid except Pro or Gly
  MISC_FEATURE (330)..(330): Xaa can be any naturally occurring amino acid except Pro or Gly
  MISC_FEATURE (331)..(331): Xaa can be any naturally occurring amino acid except Pro or Gly
  MISC_FEATURE (333)..(333): Xaa can be any naturally occurring amino acid
  MISC_FEATURE (334)..(334): Xaa can be any naturally occurring amino acid
  MISC_FEATURE (335)..(335): Xaa can be any naturally occurring amino acid
  MISC_FEATURE (337)..(337): Xaa can be any naturally occurring amino acid except Pro or Gly
  MISC_FEATURE (338)..(338): Xaa can be any naturally occurring amino acid except Pro or Gly
  MISC_FEATURE (339)..(339): Xaa can be any naturally occurring amino acid except Pro or Gly
  MISC_FEATURE (340)..(340): Xaa can be any naturally occurring amino acid except Pro or Gly
  MISC_FEATURE (342)..(342): Xaa can be any naturally occurring amino acid
  MISC_FEATURE (343)..(343): Xaa can be any naturally occurring amino acid
  MISC_FEATURE (344)..(344): Xaa can be any naturally occurring amino acid
  MISC_FEATURE (346)..(346): Xaa can be any naturally occurring amino acid except Pro or Gly
  MISC_FEATURE (347)..(347): Xaa can be any naturally occurring amino acid except Pro or Gly
  MISC_FEATURE (348)..(348): Xaa can be any naturally occurring amino acid except Pro or Gly
  MISC_FEATURE (349)..(349): Xaa can be any naturally occurring amino acid except Pro or Gly
  MISC_FEATURE (351)..(351): Xaa can be any naturally occurring amino acid
  MISC_FEATURE (352)..(352): Xaa can be any naturally occurring amino acid
  MISC_FEATURE (353)..(353): Xaa can be any naturally occurring amino acid
  MISC_FEATURE (355)..(355): Xaa can be any naturally occurring amino acid except Pro or Gly
  MISC_FEATURE (356)..(356): Xaa can be any naturally occurring amino acid except Pro or Gly
  MISC_FEATURE (357)..(357): Xaa can be any naturally occurring amino acid except Pro or Gly
  MISC_FEATURE (358)..(358): Xaa can be any naturally occurring amino acid except Pro or Gly
  MISC_FEATURE (360)..(360): Xaa can be any naturally occurring amino acid
  MISC_FEATURE (361)..(361): Xaa can be any naturally occurring amino acid
  MISC_FEATURE (362)..(362): Xaa can be any naturally occurring amino acid
  MISC_FEATURE (364)..(364): Xaa can be any naturally occurring amino acid except Pro or Gly
  MISC_FEATURE (365)..(365): Xaa can be any naturally occurring amino acid except Pro or Gly
  MISC_FEATURE (366)..(366): Xaa can be any naturally occurring amino acid except Pro or Gly
  MISC_FEATURE (367)..(367): Xaa can be any naturally occurring amino acid except Pro or Gly
  MISC_FEATURE (369)..(369): Xaa can be any naturally occurring amino acid
  MISC_FEATURE (370)..(370): Xaa can be any naturally occurring amino acid
  MISC_FEATURE (371)..(371): Xaa can be any naturally occurring amino acid
  MISC_FEATURE (373)..(373): Xaa can be any naturally occurring amino acid except Pro or Gly
  MISC_FEATURE (374)..(374): Xaa can be any naturally occurring amino acid except Pro or Gly
  MISC_FEATURE (375)..(375): Xaa can be any naturally occurring amino acid except Pro or Gly
  MISC_FEATURE (376)..(376): Xaa can be any naturally occurring amino acid except Pro or Gly
  MISC_FEATURE (378)..(378): Xaa can be any naturally occurring amino acid
  MISC_FEATURE (379)..(379): Xaa can be any naturally occurring amino acid
  MISC_FEATURE (380)..(380): Xaa can be any naturally occurring amino acid
  MISC_FEATURE (382)..(382): Xaa can be any naturally occurring amino acid except Pro or Gly
  MISC_FEATURE (383)..(383): Xaa can be any naturally occurring amino acid except Pro or Gly
  MISC_FEATURE (384)..(384): Xaa can be any naturally occurring amino acid except Pro or Gly
  MISC_FEATURE (385)..(385): Xaa can be any naturally occurring amino acid except Pro or Gly
  MISC_FEATURE (387)..(387): Xaa can be any naturally occurring amino acid
  MISC_FEATURE (388)..(388): Xaa can be any naturally occurring amino acid
  MISC_FEATURE (389)..(389): Xaa can be any naturally occurring amino acid
  MISC_FEATURE (391)..(391): Xaa can be any naturally occurring amino acid except Pro or Gly
  MISC_FEATURE (392)..(392): Xaa can be any naturally occurring amino acid except Pro or Gly
  MISC_FEATURE (393)..(393): Xaa can be any naturally occurring amino acid except Pro or Gly
  MISC_FEATURE (394)..(394): Xaa can be any naturally occurring amino acid except Pro or Gly
  MISC_FEATURE (396)..(396): Xaa can be any naturally occurring amino acid
  MISC_FEATURE (397)..(397): Xaa can be any naturally occurring amino acid
  MISC_FEATURE (398)..(398): Xaa can be any naturally occurring amino acid
  MISC_FEATURE (400)..(400): Xaa can be any naturally occurring amino acid except Pro or Gly
  MISC_FEATURE (401)..(401): Xaa can be any naturally occurring amino acid except Pro or Gly
  MISC_FEATURE (402)..(402): Xaa can be any naturally occurring amino acid except Pro or Gly
  MISC_FEATURE (403)..(403): Xaa can be any naturally occurring amino acid except Pro or Gly
  MISC_FEATURE (405)..(405): Xaa can be any naturally occurring amino acid
  MISC_FEATURE (406)..(406): Xaa can be any naturally occurring amino acid
  MISC_FEATURE (407)..(407): Xaa can be any naturally occurring amino acid
  MISC_FEATURE (409)..(409): Xaa can be any naturally occurring amino acid except Pro or Gly
  MISC_FEATURE (410)..(410): Xaa can be any naturally occurring amino acid except Pro or Gly
  MISC_FEATURE (411)..(411): Xaa can be any naturally occurring amino acid except Pro or Gly
  MISC_FEATURE (412)..(412): Xaa can be any naturally occurring amino acid except Pro or Gly
  MISC_FEATURE (414)..(414): Xaa can be any naturally occurring amino acid
  MISC_FEATURE (415)..(415): Xaa can be any naturally occurring amino acid
  MISC_FEATURE (416)..(416): Xaa can be any naturally occurring amino acid
  MISC_FEATURE (418)..(418): Xaa can be any naturally occurring amino acid except Pro or Gly
  MISC_FEATURE (419)..(419): Xaa can be any naturally occurring amino acid except Pro or Gly
  MISC_FEATURE (420)..(420): Xaa can be any naturally occurring amino acid except Pro or Gly
  MISC_FEATURE (421)..(421): Xaa can be any naturally occurring amino acid except Pro or Gly
  MISC_FEATURE (423)..(423): Xaa can be any naturally occurring amino acid
  MISC_FEATURE (424)..(424): Xaa can be any naturally occurring amino acid
  MISC_FEATURE (425)..(425): Xaa can be any naturally occurring amino acid
  MISC_FEATURE (427)..(427): Xaa can be any naturally occurring amino acid except Pro or Gly
  MISC_FEATURE (428)..(428): Xaa can be any naturally occurring amino acid except Pro or Gly
  MISC_FEATURE (429)..(429): Xaa can be any naturally occurring amino acid except Pro or Gly
  MISC_FEATURE (430)..(430): Xaa can be any naturally occurring amino acid except Pro or Gly
  MISC_FEATURE (432)..(432): Xaa can be any naturally occurring amino acid
  MISC_FEATURE (433)..(433): Xaa can be any naturally occurring amino acid
  MISC_FEATURE (434)..(434): Xaa can be any naturally occurring amino acid
  MISC_FEATURE (436)..(436): Xaa can be any naturally occurring amino acid except Pro or Gly
  MISC_FEATURE (437)..(437): Xaa can be any naturally occurring amino acid except Pro or Gly
  MISC_FEATURE (438)..(438): Xaa can be any naturally occurring amino acid except Pro or Gly
  MISC_FEATURE (439)..(439): Xaa can be any naturally occurring amino acid except Pro or Gly
  MISC_FEATURE (441)..(441): Xaa can be any naturally occurring amino acid
  MISC_FEATURE (442)..(442): Xaa can be any naturally occurring amino acid
  MISC_FEATURE (443)..(443): Xaa can be any naturally occurring amino acid
  MISC_FEATURE (445)..(445): Xaa can be any naturally occurring amino acid except Pro or Gly
  MISC_FEATURE (446)..(446): Xaa can be any naturally occurring amino acid except Pro or Gly
  MISC_FEATURE (447)..(447): Xaa can be any naturally occurring amino acid except Pro or Gly
  MISC_FEATURE (448)..(448): Xaa can be any naturally occurring amino acid except Pro or Gly
  MISC_FEATURE (450)..(450): Xaa can be any naturally occurring amino acid
  MISC_FEATURE (451)..(451): Xaa can be any naturally occurring amino acid
  MISC_FEATURE (452)..(452): Xaa can be any naturally occurring amino acid
  MISC_FEATURE (454)..(454): Xaa can be any naturally occurring amino acid except Pro or Gly
  MISC_FEATURE (455)..(455): Xaa can be any naturally occurring amino acid except Pro or Gly
  MISC_FEATURE (456)..(456): Xaa can be any naturally occurring amino acid except Pro or Gly
  MISC_FEATURE (457)..(457): Xaa can be any naturally occurring amino acid except Pro or Gly
  MISC_FEATURE (459)..(459): Xaa can be any naturally occurring amino acid
  MISC_FEATURE (460)..(460): Xaa can be any naturally occurring amino acid
  MISC_FEATURE (461)..(461): Xaa can be any naturally occurring amino acid
  MISC_FEATURE (463)..(463): Xaa can be any naturally occurring amino acid except Pro or Gly
  MISC_FEATURE (464)..(464): Xaa can be any naturally occurring amino acid except Pro or Gly
  MISC_FEATURE (465)..(465): Xaa can be any naturally occurring amino acid except Pro or Gly
  MISC_FEATURE (466)..(466): Xaa can be any naturally occurring amino acid except Pro or Gly
  MISC_FEATURE (468)..(468): Xaa can be any naturally occurring amino acid
  MISC_FEATURE (469)..(469): Xaa can be any naturally occurring amino acid
  MISC_FEATURE (470)..(470): Xaa can be any naturally occurring amino acid
  MISC_FEATURE (472)..(472): Xaa can be any naturally occurring amino acid except Pro or Gly
  MISC_FEATURE (473)..(473): Xaa can be any naturally occurring amino acid except Pro or Gly
  MISC_FEATURE (474)..(474): Xaa can be any naturally occurring amino acid except Pro or Gly
  MISC_FEATURE (475)..(475): Xaa can be any naturally occurring amino acid except Pro or Gly
  MISC_FEATURE (477)..(477): Xaa can be any naturally occurring amino acid
  MISC_FEATURE (478)..(478): Xaa can be any naturally occurring amino acid
  MISC_FEATURE (479)..(479): Xaa can be any naturally occurring amino acid
  MISC_FEATURE (481)..(481): Xaa can be any naturally occurring amino acid except Pro or Gly
  MISC_FEATURE (482)..(482): Xaa can be any naturally occurring amino acid except Pro or Gly
  MISC_FEATURE (483)..(483): Xaa can be any naturally occurring amino acid except Pro or Gly
  MISC_FEATURE (484)..(484): Xaa can be any naturally occurring amino acid except Pro or Gly
  MISC_FEATURE (486)..(486): Xaa can be any naturally occurring amino acid
  MISC_FEATURE (487)..(487): Xaa can be any naturally occurring amino acid
  MISC_FEATURE (488)..(488): Xaa can be any naturally occurring amino acid
  MISC_FEATURE (490)..(490): Xaa can be any naturally occurring amino acid except Pro or Gly
  MISC_FEATURE (491)..(491): Xaa can be any naturally occurring amino acid except Pro or Gly
  MISC_FEATURE (492)..(492): Xaa can be any naturally occurring amino acid except Pro or Gly
  MISC_FEATURE (493)..(493): Xaa can be any naturally occurring amino acid except Pro or Gly
  MISC_FEATURE (495)..(495): Xaa can be any naturally occurring amino acid
  MISC_FEATURE (496)..(496): Xaa can be any naturally occurring amino acid
  MISC_FEATURE (497)..(497): Xaa can be any naturally occurring amino acid
  MISC_FEATURE (499)..(499): Xaa can be any naturally occurring amino acid except Pro or Gly
  MISC_FEATURE (500)..(500): Xaa can be any naturally occurring amino acid except Pro or Gly
  MISC_FEATURE (501)..(501): Xaa can be any naturally occurring amino acid except Pro or Gly
  MISC_FEATURE (502)..(502): Xaa can be any naturally occurring amino acid except Pro or Gly
  MISC_FEATURE (504)..(504): Xaa can be any naturally occurring amino acid
  MISC_FEATURE (505)..(505): Xaa can be any naturally occurring amino acid
  MISC_FEATURE (506)..(506): Xaa can be any naturally occurring amino acid
  MISC_FEATURE (508)..(508): Xaa can be any naturally occurring amino acid except Pro or Gly
  MISC_FEATURE (509)..(509): Xaa can be any naturally occurring amino acid except Pro or Gly
  MISC_FEATURE (510)..(510): Xaa can be any naturally occurring amino acid except Pro or Gly
  MISC_FEATURE (511)..(511): Xaa can be any naturally occurring amino acid except Pro or Gly
  MISC_FEATURE (513)..(513): Xaa can be any naturally occurring amino acid
  MISC_FEATURE (514)..(514): Xaa can be any naturally occurring amino acid
  MISC_FEATURE (515)..(515): Xaa can be any naturally occurring amino acid
  MISC_FEATURE (517)..(517): Xaa can be any naturally occurring amino acid except Pro or Gly
  MISC_FEATURE (518)..(518): Xaa can be any naturally occurring amino acid except Pro or Gly
  MISC_FEATURE (519)..(519): Xaa can be any naturally occurring amino acid except Pro or Gly
  MISC_FEATURE (520)..(520): Xaa can be any naturally occurring amino acid except Pro or Gly
  MISC_FEATURE (522)..(522): Xaa can be any naturally occurring amino acid
  MISC_FEATURE (523)..(523): Xaa can be any naturally occurring amino acid
  MISC_FEATURE (524)..(524): Xaa can be any naturally occurring amino acid
  MISC_FEATURE (526)..(526): Xaa can be any naturally occurring amino acid except Pro or Gly
  MISC_FEATURE (527)..(527): Xaa can be any naturally occurring amino acid except Pro or Gly
  MISC_FEATURE (528)..(528): Xaa can be any naturally occurring amino acid except Pro or Gly
  MISC_FEATURE (529)..(529): Xaa can be any naturally occurring amino acid except Pro or Gly
  MISC_FEATURE (531)..(531): Xaa can be any naturally occurring amino acid
  MISC_FEATURE (532)..(532): Xaa can be any naturally occurring amino acid
  MISC_FEATURE (533)..(533): Xaa can be any naturally occurring amino acid
  MISC_FEATURE (535)..(535): Xaa can be any naturally occurring amino acid except Pro or Gly
  MISC_FEATURE (536)..(536): Xaa can be any naturally occurring amino acid except Pro or Gly
  MISC_FEATURE (537)..(537): Xaa can be any naturally occurring amino acid except Pro or Gly
  MISC_FEATURE (538)..(538): Xaa can be any naturally occurring amino acid except Pro or Gly
  MISC_FEATURE (540)..(540): Xaa can be any naturally occurring amino acid
  MISC_FEATURE (541)..(541): Xaa can be any naturally occurring amino acid
  MISC_FEATURE (542)..(542): Xaa can be any naturally occurring amino acid
  MISC_FEATURE (544)..(544): Xaa can be any naturally occurring amino acid except Pro or Gly
  MISC_FEATURE (545)..(545): Xaa can be any naturally occurring amino acid except Pro or Gly
  MISC_FEATURE (546)..(546): Xaa can be any naturally occurring amino acid except Pro or Gly
  MISC_FEATURE (547)..(547): Xaa can be any naturally occurring amino acid except Pro or Gly
  MISC_FEATURE (549)..(549): Xaa can be any naturally occurring amino acid
  MISC_FEATURE (550)..(550): Xaa can be any naturally occurring amino acid
  MISC_FEATURE (551)..(551): Xaa can be any naturally occurring amino acid
  MISC_FEATURE (553)..(553): Xaa can be any naturally occurring amino acid except Pro or Gly
  MISC_FEATURE (554)..(554): Xaa can be any naturally occurring amino acid except Pro or Gly
  MISC_FEATURE (555)..(555): Xaa can be any naturally occurring amino acid except Pro or Gly
  MISC_FEATURE (556)..(556): Xaa can be any naturally occurring amino acid except Pro or Gly
  MISC_FEATURE (558)..(558): Xaa can be any naturally occurring amino acid
  MISC_FEATURE (559)..(559): Xaa can be any naturally occurring amino acid
  MISC_FEATURE (560)..(560): Xaa can be any naturally occurring amino acid
  MISC_FEATURE (562)..(562): Xaa can be any naturally occurring amino acid except Pro or Gly
  MISC_FEATURE (563)..(563): Xaa can be any naturally occurring amino acid except Pro or Gly
  MISC_FEATURE (564)..(564): Xaa can be any naturally occurring amino acid except Pro or Gly
  MISC_FEATURE (565)..(565): Xaa can be any naturally occurring amino acid except Pro or Gly
  MISC_FEATURE (567)..(567): Xaa can be any naturally occurring amino acid
  MISC_FEATURE (568)..(568): Xaa can be any naturally occurring amino acid
  MISC_FEATURE (569)..(569): Xaa can be any naturally occurring amino acid
  MISC_FEATURE (571)..(571): Xaa can be any naturally occurring amino acid except Pro or Gly
  MISC_FEATURE (572)..(572): Xaa can be any naturally occurring amino acid except Pro or Gly
  MISC_FEATURE (573)..(573): Xaa can be any naturally occurring amino acid except Pro or Gly
  MISC_FEATURE (574)..(574): Xaa can be any naturally occurring amino acid except Pro or Gly
  MISC_FEATURE (576)..(576): Xaa can be any naturally occurring amino acid
  MISC_FEATURE (577)..(577): Xaa can be any naturally occurring amino acid
  MISC_FEATURE (578)..(578): Xaa can be any naturally occurring amino acid
  MISC_FEATURE (580)..(580): Xaa can be any naturally occurring amino acid except Pro or Gly
  MISC_FEATURE (581)..(581): Xaa can be any naturally occurring amino acid except Pro or Gly
  MISC_FEATURE (582)..(582): Xaa can be any naturally occurring amino acid except Pro or Gly
  MISC_FEATURE (583)..(583): Xaa can be any naturally occurring amino acid except Pro or Gly
  MISC_FEATURE (585)..(585): Xaa can be any naturally occurring amino acid
  MISC_FEATURE (586)..(586): Xaa can be any naturally occurring amino acid
  MISC_FEATURE (587)..(587): Xaa can be any naturally occurring amino acid
  MISC_FEATURE (589)..(589): Xaa can be any naturally occurring amino acid except Pro or Gly
  MISC_FEATURE (590)..(590): Xaa can be any naturally occurring amino acid except Pro or Gly
  MISC_FEATURE (591)..(591): Xaa can be any naturally occurring amino acid except Pro or Gly
  MISC_FEATURE (592)..(592): Xaa can be any naturally occurring amino acid except Pro or Gly
  MISC_FEATURE (594)..(594): Xaa can be any naturally occurring amino acid
  MISC_FEATURE (595)..(595): Xaa can be any naturally occurring amino acid
  MISC_FEATURE (596)..(596): Xaa can be any naturally occurring amino acid
  MISC_FEATURE (598)..(598): Xaa can be any naturally occurring amino acid except Pro or Gly
  MISC_FEATURE (599)..(599): Xaa can be any naturally occurring amino acid except Pro or Gly
  MISC_FEATURE (600)..(600): Xaa can be any naturally occurring amino acid except Pro or Gly
  MISC_FEATURE (601)..(601): Xaa can be any naturally occurring amino acid except Pro or Gly
  MISC_FEATURE (603)..(603): Xaa can be any naturally occurring amino acid
  MISC_FEATURE (604)..(604): Xaa can be any naturally occurring amino acid
  MISC_FEATURE (605)..(605): Xaa can be any naturally occurring amino acid
  MISC_FEATURE (607)..(607): Xaa can be any naturally occurring amino acid except Pro or Gly
  MISC_FEATURE (608)..(608): Xaa can be any naturally occurring amino acid except Pro or Gly
  MISC_FEATURE (609)..(609): Xaa can be any naturally occurring amino acid except Pro or Gly
  MISC_FEATURE (610)..(610): Xaa can be any naturally occurring amino acid except Pro or Gly
  MISC_FEATURE (612)..(612): Xaa can be any naturally occurring amino acid
  MISC_FEATURE (613)..(613): Xaa can be any naturally occurring amino acid
  MISC_FEATURE (614)..(614): Xaa can be any naturally occurring amino acid
  MISC_FEATURE (616)..(616): Xaa can be any naturally occurring amino acid except Pro or Gly
  MISC_FEATURE (617)..(617): Xaa can be any naturally occurring amino acid except Pro or Gly
  MISC_FEATURE (618)..(618): Xaa can be any naturally occurring amino acid except Pro or Gly
  MISC_FEATURE (619)..(619): Xaa can be any naturally occurring amino acid except Pro or Gly
  MISC_FEATURE (621)..(621): Xaa can be any naturally occurring amino acid
  MISC_FEATURE (622)..(622): Xaa can be any naturally occurring amino acid
  MISC_FEATURE (623)..(623): Xaa can be any naturally occurring amino acid
  MISC_FEATURE (625)..(625): Xaa can be any naturally occurring amino acid except Pro or Gly
  MISC_FEATURE (626)..(626): Xaa can be any naturally occurring amino acid except Pro or Gly
  MISC_FEATURE (627)..(627): Xaa can be any naturally occurring amino acid except Pro or Gly
  MISC_FEATURE (628)..(628): Xaa can be any naturally occurring amino acid except Pro or Gly
  MISC_FEATURE (630)..(630): Xaa can be any naturally occurring amino acid
  MISC_FEATURE (631)..(631): Xaa can be any naturally occurring amino acid
  MISC_FEATURE (632)..(632): Xaa can be any naturally occurring amino acid
  MISC_FEATURE (634)..(634): Xaa can be any naturally occurring amino acid except Pro or Gly
  MISC_FEATURE (635)..(635): Xaa can be any naturally occurring amino acid except Pro or Gly
  MISC_FEATURE (636)..(636): Xaa can be any naturally occurring amino acid except Pro or Gly
  MISC_FEATURE (637)..(637): Xaa can be any naturally occurring amino acid except Pro or Gly
  MISC_FEATURE (639)..(639): Xaa can be any naturally occurring amino acid
  MISC_FEATURE (640)..(640): Xaa can be any naturally occurring amino acid
  MISC_FEATURE (641)..(641): Xaa can be any naturally occurring amino acid
  MISC_FEATURE (643)..(643): Xaa can be any naturally occurring amino acid except Pro or Gly
  MISC_FEATURE (644)..(644): Xaa can be any naturally occurring amino acid except Pro or Gly
  MISC_FEATURE (645)..(645): Xaa can be any naturally occurring amino acid except Pro or Gly
  MISC_FEATURE (646)..(646): Xaa can be any naturally occurring amino acid except Pro or Gly
  MISC_FEATURE (648)..(648): Xaa can be any naturally occurring amino acid
  MISC_FEATURE (649)..(649): Xaa can be any naturally occurring amino acid
  MISC_FEATURE (650)..(650): Xaa can be any naturally occurring amino acid
  MISC_FEATURE (652)..(652): Xaa can be any naturally occurring amino acid except Pro or Gly
  MISC_FEATURE (653)..(653): Xaa can be any naturally occurring amino acid except Pro or Gly
  MISC_FEATURE (654)..(654): Xaa can be any naturally occurring amino acid except Pro or Gly
  MISC_FEATURE (655)..(655): Xaa can be any naturally occurring amino acid except Pro or Gly
  MISC_FEATURE (657)..(657): Xaa can be any naturally occurring amino acid
  MISC_FEATURE (658)..(658): Xaa can be any naturally occurring amino acid
  MISC_FEATURE (659)..(659): Xaa can be any naturally occurring amino acid
  MISC_FEATURE (661)..(661): Xaa can be any naturally occurring amino acid except Pro or Gly
  MISC_FEATURE (662)..(662): Xaa can be any naturally occurring amino acid except Pro or Gly
  MISC_FEATURE (663)..(663): Xaa can be any naturally occurring amino acid except Pro or Gly
  MISC_FEATURE (664)..(664): Xaa can be any naturally occurring amino acid except Pro or Gly
  MISC_FEATURE (666)..(666): Xaa can be any naturally occurring amino acid
  MISC_FEATURE (667)..(667): Xaa can be any naturally occurring amino acid
  MISC_FEATURE (668)..(668): Xaa can be any naturally occurring amino acid
  MISC_FEATURE (670)..(670): Xaa can be any naturally occurring amino acid except Pro or Gly
  MISC_FEATURE (671)..(671): Xaa can be any naturally occurring amino acid except Pro or Gly
  MISC_FEATURE (672)..(672): Xaa can be any naturally occurring amino acid except Pro or Gly
  MISC_FEATURE (673)..(673): Xaa can be any naturally occurring amino acid except Pro or Gly
  MISC_FEATURE (675)..(675): Xaa can be any naturally occurring amino acid
  MISC_FEATURE (676)..(676): Xaa can be any naturally occurring amino acid
  MISC_FEATURE (677)..(677): Xaa can be any naturally occurring amino acid
  MISC_FEATURE (679)..(679): Xaa can be any naturally occurring amino acid except Pro or Gly
  MISC_FEATURE (680)..(680): Xaa can be any naturally occurring amino acid except Pro or Gly
  MISC_FEATURE (681)..(681): Xaa can be any naturally occurring amino acid except Pro or Gly
  MISC_FEATURE (682)..(682): Xaa can be any naturally occurring amino acid except Pro or Gly
  MISC_FEATURE (684)..(684): Xaa can be any naturally occurring amino acid
  MISC_FEATURE (685)..(685): Xaa can be any naturally occurring amino acid
  MISC_FEATURE (686)..(686): Xaa can be any naturally occurring amino acid
  MISC_FEATURE (688)..(688): Xaa can be any naturally occurring amino acid except Pro or Gly
  MISC_FEATURE (689)..(689): Xaa can be any naturally occurring amino acid except Pro or Gly
  MISC_FEATURE (690)..(690): Xaa can be any naturally occurring amino acid except Pro or Gly
  MISC_FEATURE (691)..(691): Xaa can be any naturally occurring amino acid except Pro or Gly
  MISC_FEATURE (693)..(693): Xaa can be any naturally occurring amino acid
  MISC_FEATURE (694)..(694): Xaa can be any naturally occurring amino acid
  MISC_FEATURE (695)..(695): Xaa can be any naturally occurring amino acid
  MISC_FEATURE (697)..(697): Xaa can be any naturally occurring amino acid except Pro or Gly
  MISC_FEATURE (698)..(698): Xaa can be any naturally occurring amino acid except Pro or Gly
  MISC_FEATURE (699)..(699): Xaa can be any naturally occurring amino acid except Pro or Gly
  MISC_FEATURE (700)..(700): Xaa can be any naturally occurring amino acid except Pro or Gly
  MISC_FEATURE (702)..(702): Xaa can be any naturally occurring amino acid
  MISC_FEATURE (703)..(703): Xaa can be any naturally occurring amino acid
  MISC_FEATURE (704)..(704): Xaa can be any naturally occurring amino acid
  MISC_FEATURE (706)..(706): Xaa can be any naturally occurring amino acid except Pro or Gly
  MISC_FEATURE (707)..(707): Xaa can be any naturally occurring amino acid except Pro or Gly
  MISC_FEATURE (708)..(708): Xaa can be any naturally occurring amino acid except Pro or Gly
  MISC_FEATURE (709)..(709): Xaa can be any naturally occurring amino acid except Pro or Gly
  MISC_FEATURE (711)..(711): Xaa can be any naturally occurring amino acid
  MISC_FEATURE (712)..(712): Xaa can be any naturally occurring amino acid
  MISC_FEATURE (713)..(713): Xaa can be any naturally occurring amino acid
  MISC_FEATURE (715)..(715): Xaa can be any naturally occurring amino acid except Pro or Gly
  MISC_FEATURE (716)..(716): Xaa can be any naturally occurring amino acid except Pro or Gly
  MISC_FEATURE (717)..(717): Xaa can be any naturally occurring amino acid except Pro or Gly
  MISC_FEATURE (718)..(718): Xaa can be any naturally occurring amino acid except Pro or Gly
  MISC_FEATURE (720)..(720): Xaa can be any naturally occurring amino acid
  MISC_FEATURE (721)..(721): Xaa can be any naturally occurring amino acid
  MISC_FEATURE (722)..(722): Xaa can be any naturally occurring amino acid
  MISC_FEATURE (724)..(724): Xaa can be any naturally occurring amino acid except Pro or Gly
  MISC_FEATURE (725)..(725): Xaa can be any naturally occurring amino acid except Pro or Gly
  MISC_FEATURE (726)..(726): Xaa can be any naturally occurring amino acid except Pro or Gly
  MISC_FEATURE (727)..(727): Xaa can be any naturally occurring amino acid except Pro or Gly
  MISC_FEATURE (729)..(729): Xaa can be any naturally occurring amino acid
  MISC_FEATURE (730)..(730): Xaa can be any naturally occurring amino acid
  MISC_FEATURE (731)..(731): Xaa can be any naturally occurring amino acid
  MISC_FEATURE (733)..(733): Xaa can be any naturally occurring amino acid except Pro or Gly
  MISC_FEATURE (734)..(734): Xaa can be any naturally occurring amino acid except Pro or Gly
  MISC_FEATURE (735)..(735): Xaa can be any naturally occurring amino acid except Pro or Gly
  MISC_FEATURE (736)..(736): Xaa can be any naturally occurring amino acid except Pro or Gly
  MISC_FEATURE (738)..(738): Xaa can be any naturally occurring amino acid
  MISC_FEATURE (739)..(739): Xaa can be any naturally occurring amino acid
  MISC_FEATURE (740)..(740): Xaa can be any naturally occurring amino acid
  MISC_FEATURE (742)..(742): Xaa can be any naturally occurring amino acid except Pro or Gly
  MISC_FEATURE (743)..(743): Xaa can be any naturally occurring amino acid except Pro or Gly
  MISC_FEATURE (744)..(744): Xaa can be any naturally occurring amino acid except Pro or Gly
  MISC_FEATURE (745)..(745): Xaa can be any naturally occurring amino acid except Pro or Gly
  MISC_FEATURE (747)..(747): Xaa can be any naturally occurring amino acid
  MISC_FEATURE (748)..(748): Xaa can be any naturally occurring amino acid
  MISC_FEATURE (749)..(749): Xaa can be any naturally occurring amino acid
  MISC_FEATURE (751)..(751): Xaa can be any naturally occurring amino acid except Pro or Gly
  MISC_FEATURE (752)..(752): Xaa can be any naturally occurring amino acid except Pro or Gly
  MISC_FEATURE (753)..(753): Xaa can be any naturally occurring amino acid except Pro or Gly
  MISC_FEATURE (754)..(754): Xaa can be any naturally occurring amino acid except Pro or Gly
  MISC_FEATURE (756)..(756): Xaa can be any naturally occurring amino acid
  MISC_FEATURE (757)..(757): Xaa can be any naturally occurring amino acid
  MISC_FEATURE (758)..(758): Xaa can be any naturally occurring amino acid
  MISC_FEATURE (760)..(760): Xaa can be any naturally occurring amino acid except Pro or Gly
  MISC_FEATURE (761)..(761): Xaa can be any naturally occurring amino acid except Pro or Gly
  MISC_FEATURE (762)..(762): Xaa can be any naturally occurring amino acid except Pro or Gly
  MISC_FEATURE (763)..(763): Xaa can be any naturally occurring amino acid except Pro or Gly
  MISC_FEATURE (765)..(765): Xaa can be any naturally occurring amino acid
  MISC_FEATURE (766)..(766): Xaa can be any naturally occurring amino acid
  MISC_FEATURE (767)..(767): Xaa can be any naturally occurring amino acid
  MISC_FEATURE (769)..(769): Xaa can be any naturally occurring amino acid except Pro or Gly
  MISC_FEATURE (770)..(770): Xaa can be any naturally occurring amino acid except Pro or Gly
  MISC_FEATURE (771)..(771): Xaa can be any naturally occurring amino acid except Pro or Gly
  MISC_FEATURE (772)..(772): Xaa can be any naturally occurring amino acid except Pro or Gly
  MISC_FEATURE (774)..(774): Xaa can be any naturally occurring amino acid
  MISC_FEATURE (775)..(775): Xaa can be any naturally occurring amino acid
  MISC_FEATURE (776)..(776): Xaa can be any naturally occurring amino acid
  MISC_FEATURE (778)..(778): Xaa can be any naturally occurring amino acid except Pro or Gly
  MISC_FEATURE (779)..(779): Xaa can be any naturally occurring amino acid except Pro or Gly
  MISC_FEATURE (780)..(780): Xaa can be any naturally occurring amino acid except Pro or Gly
  MISC_FEATURE (781)..(781): Xaa can be any naturally occurring amino acid except Pro or Gly
  MISC_FEATURE (783)..(783): Xaa can be any naturally occurring amino acid
  MISC_FEATURE (784)..(784): Xaa can be any naturally occurring amino acid
  MISC_FEATURE (785)..(785): Xaa can be any naturally occurring amino acid
  MISC_FEATURE (787)..(787): Xaa can be any naturally occurring amino acid except Pro or Gly
  MISC_FEATURE (788)..(788): Xaa can be any naturally occurring amino acid except Pro or Gly
  MISC_FEATURE (789)..(789): Xaa can be any naturally occurring amino acid except Pro or Gly
  MISC_FEATURE (790)..(790): Xaa can be any naturally occurring amino acid except Pro or Gly
  MISC_FEATURE (792)..(792): Xaa can be any naturally occurring amino acid
  MISC_FEATURE (793)..(793): Xaa can be any naturally occurring amino acid
  MISC_FEATURE (794)..(794): Xaa can be any naturally occurring amino acid
  MISC_FEATURE (796)..(796): Xaa can be any naturally occurring amino acid except Pro or Gly
  MISC_FEATURE (797)..(797): Xaa can be any naturally occurring amino acid except Pro or Gly
  MISC_FEATURE (798)..(798): Xaa can be any naturally occurring amino acid except Pro or Gly
  MISC_FEATURE (799)..(799): Xaa can be any naturally occurring amino acid except Pro or Gly
  MISC_FEATURE (801)..(801): Xaa can be any naturally occurring amino acid
  MISC_FEATURE (802)..(802): Xaa can be any naturally occurring amino acid
  MISC_FEATURE (803)..(803): Xaa can be any naturally occurring amino acid
  MISC_FEATURE (805)..(805): Xaa can be any naturally occurring amino acid except Pro or Gly
  MISC_FEATURE (806)..(806): Xaa can be any naturally occurring amino acid except Pro or Gly
  MISC_FEATURE (807)..(807): Xaa can be any naturally occurring amino acid except Pro or Gly
  MISC_FEATURE (808)..(808): Xaa can be any naturally occurring amino acid except Pro or Gly
  MISC_FEATURE (810)..(810): Xaa can be any naturally occurring amino acid
  MISC_FEATURE (811)..(811): Xaa can be any naturally occurring amino acid
  MISC_FEATURE (812)..(812): Xaa can be any naturally occurring amino acid
  MISC_FEATURE (814)..(814): Xaa can be any naturally occurring amino acid except Pro or Gly
  MISC_FEATURE (815)..(815): Xaa can be any naturally occurring amino acid except Pro or Gly
  MISC_FEATURE (816)..(816): Xaa can be any naturally occurring amino acid except Pro or Gly
  MISC_FEATURE (817)..(817): Xaa can be any naturally occurring amino acid except Pro or Gly
  MISC_FEATURE (819)..(819): Xaa can be any naturally occurring amino acid
  MISC_FEATURE (820)..(820): Xaa can be any naturally occurring amino acid
  MISC_FEATURE (821)..(821): Xaa can be any naturally occurring amino acid
  MISC_FEATURE (823)..(823): Xaa can be any naturally occurring amino acid except Pro or Gly
  MISC_FEATURE (824)..(824): Xaa can be any naturally occurring amino acid except Pro or Gly
  MISC_FEATURE (825)..(825): Xaa can be any naturally occurring amino acid except Pro or Gly
  MISC_FEATURE (826)..(826): Xaa can be any naturally occurring amino acid except Pro or Gly
  MISC_FEATURE (828)..(828): Xaa can be any naturally occurring amino acid
  MISC_FEATURE (829)..(829): Xaa can be any naturally occurring amino acid
  MISC_FEATURE (830)..(830): Xaa can be any naturally occurring amino acid
  MISC_FEATURE (832)..(832): Xaa can be any naturally occurring amino acid except Pro or Gly
  MISC_FEATURE (833)..(833): Xaa can be any naturally occurring amino acid except Pro or Gly
  MISC_FEATURE (834)..(834): Xaa can be any naturally occurring amino acid except Pro or Gly
  MISC_FEATURE (835)..(835): Xaa can be any naturally occurring amino acid except Pro or Gly
  MISC_FEATURE (837)..(837): Xaa can be any naturally occurring amino acid
  MISC_FEATURE (838)..(838): Xaa can be any naturally occurring amino acid
  MISC_FEATURE (839)..(839): Xaa can be any naturally occurring amino acid
  MISC_FEATURE (841)..(841): Xaa can be any naturally occurring amino acid except Pro or Gly
  MISC_FEATURE (842)..(842): Xaa can be any naturally occurring amino acid except Pro or Gly
  MISC_FEATURE (843)..(843): Xaa can be any naturally occurring amino acid except Pro or Gly
  MISC_FEATURE (844)..(844): Xaa can be any naturally occurring amino acid except Pro or Gly
  MISC_FEATURE (846)..(846): Xaa can be any naturally occurring amino acid
  MISC_FEATURE (847)..(847): Xaa can be any naturally occurring amino acid
  MISC_FEATURE (848)..(848): Xaa can be any naturally occurring amino acid
  MISC_FEATURE (850)..(850): Xaa can be any naturally occurring amino acid except Pro or Gly
  MISC_FEATURE (851)..(851): Xaa can be any naturally occurring amino acid except Pro or Gly
  MISC_FEATURE (852)..(852): Xaa can be any naturally occurring amino acid except Pro or Gly
  MISC_FEATURE (853)..(853): Xaa can be any naturally occurring amino acid except Pro or Gly
  MISC_FEATURE (855)..(855): Xaa can be any naturally occurring amino acid
  MISC_FEATURE (856)..(856): Xaa can be any naturally occurring amino acid
  MISC_FEATURE (857)..(857): Xaa can be any naturally occurring amino acid
  MISC_FEATURE (859)..(859): Xaa can be any naturally occurring amino acid except Pro or Gly
  MISC_FEATURE (860)..(860): Xaa can be any naturally occurring amino acid except Pro or Gly
  MISC_FEATURE (861)..(861): Xaa can be any naturally occurring amino acid except Pro or Gly
  MISC_FEATURE (862)..(862): Xaa can be any naturally occurring amino acid except Pro or Gly
  MISC_FEATURE (864)..(864): Xaa can be any naturally occurring amino acid
  MISC_FEATURE (865)..(865): Xaa can be any naturally occurring amino acid
  MISC_FEATURE (866)..(866): Xaa can be any naturally occurring amino acid
  MISC_FEATURE (868)..(868): Xaa can be any naturally occurring amino acid except Pro or Gly
  MISC_FEATURE (869)..(869): Xaa can be any naturally occurring amino acid except Pro or Gly
  MISC_FEATURE (870)..(870): Xaa can be any naturally occurring amino acid except Pro or Gly
  MISC_FEATURE (871)..(871): Xaa can be any naturally occurring amino acid except Pro or Gly
  MISC_FEATURE (873)..(873): Xaa can be any naturally occurring amino acid
  MISC_FEATURE (874)..(874): Xaa can be any naturally occurring amino acid
  MISC_FEATURE (875)..(875): Xaa can be any naturally occurring amino acid
  MISC_FEATURE (877)..(877): Xaa can be any naturally occurring amino acid except Pro or Gly
  MISC_FEATURE (878)..(878): Xaa can be any naturally occurring amino acid except Pro or Gly
  MISC_FEATURE (879)..(879): Xaa can be any naturally occurring amino acid except Pro or Gly
  MISC_FEATURE (880)..(880): Xaa can be any naturally occurring amino acid except Pro or Gly
  MISC_FEATURE (882)..(882): Xaa can be any naturally occurring amino acid
  MISC_FEATURE (883)..(883): Xaa can be any naturally occurring amino acid
  MISC_FEATURE (884)..(884): Xaa can be any naturally occurring amino acid
  MISC_FEATURE (886)..(886): Xaa can be any naturally occurring amino acid except Pro or Gly
  MISC_FEATURE (887)..(887): Xaa can be any naturally occurring amino acid except Pro or Gly
  MISC_FEATURE (888)..(888): Xaa can be any naturally occurring amino acid except Pro or Gly
  MISC_FEATURE (889)..(889): Xaa can be any naturally occurring amino acid except Pro or Gly
  MISC_FEATURE (891)..(891): Xaa can be any naturally occurring amino acid
  MISC_FEATURE (892)..(892): Xaa can be any naturally occurring amino acid
  MISC_FEATURE (893)..(893): Xaa can be any naturally occurring amino acid
  MISC_FEATURE (895)..(895): Xaa can be any naturally occurring amino acid except Pro or Gly
  MISC_FEATURE (896)..(896): Xaa can be any naturally occurring amino acid except Pro or Gly
  MISC_FEATURE (897)..(897): Xaa can be any naturally occurring amino acid except Pro or Gly
  MISC_FEATURE (898)..(898): Xaa can be any naturally occurring amino acid except Pro or Gly
  MISC_FEATURE (900)..(900): Xaa can be any naturally occurring amino acid
  MISC_FEATURE (901)..(901): Xaa can be any naturally occurring amino acid
  MISC_FEATURE (902)..(902): Xaa can be any naturally occurring amino acid
  MISC_FEATURE (904)..(904): Xaa can be any naturally occurring amino acid except Pro or Gly
  MISC_FEATURE (905)..(905): Xaa can be any naturally occurring amino acid except Pro or Gly
  MISC_FEATURE (906)..(906): Xaa can be any naturally occurring amino acid except Pro or Gly
  MISC_FEATURE (907)..(907): Xaa can be any naturally occurring amino acid except Pro or Gly
  MISC_FEATURE (909)..(909): Xaa can be any naturally occurring amino acid
  MISC_FEATURE (910)..(910): Xaa can be any naturally occurring amino acid
  MISC_FEATURE (911)..(911): Xaa can be any naturally occurring amino acid
  MISC_FEATURE (913)..(913): Xaa can be any naturally occurring amino acid except Pro or Gly
  MISC_FEATURE (914)..(914): Xaa can be any naturally occurring amino acid except Pro or Gly
  MISC_FEATURE (915)..(915): Xaa can be any naturally occurring amino acid except Pro or Gly
  MISC_FEATURE (916)..(916): Xaa can be any naturally occurring amino acid except Pro or Gly
  MISC_FEATURE (918)..(918): Xaa can be any naturally occurring amino acid
  MISC_FEATURE (919)..(919): Xaa can be any naturally occurring amino acid
  MISC_FEATURE (920)..(920): Xaa can be any naturally occurring amino acid
  MISC_FEATURE (922)..(922): Xaa can be any naturally occurring amino acid except Pro or Gly
  MISC_FEATURE (923)..(923): Xaa can be any naturally occurring amino acid except Pro or Gly
  MISC_FEATURE (924)..(924): Xaa can be any naturally occurring amino acid except Pro or Gly
  MISC_FEATURE (925)..(925): Xaa can be any naturally occurring amino acid except Pro or Gly
  MISC_FEATURE (927)..(927): Xaa can be any naturally occurring amino acid
  MISC_FEATURE (928)..(928): Xaa can be any naturally occurring amino acid
  MISC_FEATURE (929)..(929): Xaa can be any naturally occurring amino acid
  MISC_FEATURE (931)..(931): Xaa can be any naturally occurring amino acid except Pro or Gly
  MISC_FEATURE (932)..(932): Xaa can be any naturally occurring amino acid except Pro or Gly
  MISC_FEATURE (933)..(933): Xaa can be any naturally occurring amino acid except Pro or Gly
  MISC_FEATURE (934)..(934): Xaa can be any naturally occurring amino acid except Pro or Gly
  MISC_FEATURE (936)..(936): Xaa can be any naturally occurring amino acid
  MISC_FEATURE (937)..(937): Xaa can be any naturally occurring amino acid
  MISC_FEATURE (938)..(938): Xaa can be any naturally occurring amino acid
  MISC_FEATURE (940)..(940): Xaa can be any naturally occurring amino acid except Pro or Gly
  MISC_FEATURE (941)..(941): Xaa can be any naturally occurring amino acid except Pro or Gly
  MISC_FEATURE (942)..(942): Xaa can be any naturally occurring amino acid except Pro or Gly
  MISC_FEATURE (943)..(943): Xaa can be any naturally occurring amino acid except Pro or Gly
  MISC_FEATURE (945)..(945): Xaa can be any naturally occurring amino acid
  MISC_FEATURE (946)..(946): Xaa can be any naturally occurring amino acid
  MISC_FEATURE (947)..(947): Xaa can be any naturally occurring amino acid
  MISC_FEATURE (949)..(949): Xaa can be any naturally occurring amino acid except Pro or Gly
  MISC_FEATURE (950)..(950): Xaa can be any naturally occurring amino acid except Pro or Gly
  MISC_FEATURE (951)..(951): Xaa can be any naturally occurring amino acid except Pro or Gly
  MISC_FEATURE (952)..(952): Xaa can be any naturally occurring amino acid except Pro or Gly
  MISC_FEATURE (954)..(954): Xaa can be any naturally occurring amino acid
  MISC_FEATURE (955)..(955): Xaa can be any naturally occurring amino acid
  MISC_FEATURE (956)..(956): Xaa can be any naturally occurring amino acid
  MISC_FEATURE (958)..(958): Xaa can be any naturally occurring amino acid except Pro or Gly
  MISC_FEATURE (959)..(959): Xaa can be any naturally occurring amino acid except Pro or Gly
  MISC_FEATURE (960)..(960): Xaa can be any naturally occurring amino acid except Pro or Gly
  MISC_FEATURE (961)..(961): Xaa can be any naturally occurring amino acid except Pro or Gly
  MISC_FEATURE (963)..(963): Xaa can be any naturally occurring amino acid
  MISC_FEATURE (964)..(964): Xaa can be any naturally occurring amino acid
  MISC_FEATURE (965)..(965): Xaa can be any naturally occurring amino acid
  MISC_FEATURE (967)..(967): Xaa can be any naturally occurring amino acid except Pro or Gly
  MISC_FEATURE (968)..(968): Xaa can be any naturally occurring amino acid except Pro or Gly
  MISC_FEATURE (969)..(969): Xaa can be any naturally occurring amino acid except Pro or Gly
  MISC_FEATURE (970)..(970): Xaa can be any naturally occurring amino acid except Pro or Gly
  MISC_FEATURE (972)..(972): Xaa can be any naturally occurring amino acid
  MISC_FEATURE (973)..(973): Xaa can be any naturally occurring amino acid
  MISC_FEATURE (974)..(974): Xaa can be any naturally occurring amino acid
  MISC_FEATURE (976)..(976): Xaa can be any naturally occurring amino acid except Pro or Gly
  MISC_FEATURE (977)..(977): Xaa can be any naturally occurring amino acid except Pro or Gly
  MISC_FEATURE (978)..(978): Xaa can be any naturally occurring amino acid except Pro or Gly
  MISC_FEATURE (979)..(979): Xaa can be any naturally occurring amino acid except Pro or Gly
  MISC_FEATURE (981)..(981): Xaa can be any naturally occurring amino acid
  MISC_FEATURE (982)..(982): Xaa can be any naturally occurring amino acid
  MISC_FEATURE (983)..(983): Xaa can be any naturally occurring amino acid
  MISC_FEATURE (985)..(985): Xaa can be any naturally occurring amino acid except Pro or Gly
  MISC_FEATURE (986)..(986): Xaa can be any naturally occurring amino acid except Pro or Gly
  MISC_FEATURE (987)..(987): Xaa can be any naturally occurring amino acid except Pro or Gly
  MISC_FEATURE (988)..(988): Xaa can be any naturally occurring amino acid except Pro or Gly
  MISC_FEATURE (990)..(990): Xaa can be any naturally occurring amino acid
  MISC_FEATURE (991)..(991): Xaa can be any naturally occurring amino acid
  MISC_FEATURE (992)..(992): Xaa can be any naturally occurring amino acid
  MISC_FEATURE (994)..(994): Xaa can be any naturally occurring amino acid except Pro or Gly
  MISC_FEATURE (995)..(995): Xaa can be any naturally occurring amino acid except Pro or Gly
  MISC_FEATURE (996)..(996): Xaa can be any naturally occurring amino acid except Pro or Gly
  MISC_FEATURE (997)..(997): Xaa can be any naturally occurring amino acid except Pro or Gly
  MISC_FEATURE (999)..(999): Xaa can be any naturally occurring amino acid
  MISC_FEATURE (1000)..(1000): Xaa can be any naturally occurring amino acid
  MISC_FEATURE (1001)..(1001): Xaa can be any naturally occurring amino acid
  MISC_FEATURE (1003)..(1003): Xaa can be any naturally occurring amino acid except Pro or Gly
  MISC_FEATURE (1004)..(1004): Xaa can be any naturally occurring amino acid except Pro or Gly
  MISC_FEATURE (1005)..(1005): Xaa can be any naturally occurring amino acid except Pro or Gly
  MISC_FEATURE (1006)..(1006): Xaa can be any naturally occurring amino acid except Pro or Gly
  MISC_FEATURE (1008)..(1008): Xaa can be any naturally occurring amino acid
  MISC_FEATURE (1009)..(1009): Xaa can be any naturally occurring amino acid
  MISC_FEATURE (1010)..(1010): Xaa can be any naturally occurring amino acid
  MISC_FEATURE (1012)..(1012): Xaa can be any naturally occurring amino acid except Pro or Gly
  MISC_FEATURE (1013)..(1013): Xaa can be any naturally occurring amino acid except Pro or Gly
  MISC_FEATURE (1014)..(1014): Xaa can be any naturally occurring amino acid except Pro or Gly
  MISC_FEATURE (1015)..(1015): Xaa can be any naturally occurring amino acid except Pro or Gly
  MISC_FEATURE (1017)..(1017): Xaa can be any naturally occurring amino acid
  MISC_FEATURE (1018)..(1018): Xaa can be any naturally occurring amino acid
  MISC_FEATURE (1019)..(1019): Xaa can be any naturally occurring amino acid
  MISC_FEATURE (1021)..(1021): Xaa can be any naturally occurring amino acid except Pro or Gly
  MISC_FEATURE (1022)..(1022): Xaa can be any naturally occurring amino acid except Pro or Gly
  MISC_FEATURE (1023)..(1023): Xaa can be any naturally occurring amino acid except Pro or Gly
  MISC_FEATURE (1024)..(1024): Xaa can be any naturally occurring amino acid except Pro or Gly
  MISC_FEATURE (1026)..(1026): Xaa can be any naturally occurring amino acid
  MISC_FEATURE (1027)..(1027): Xaa can be any naturally occurring amino acid
  MISC_FEATURE (1028)..(1028): Xaa can be any naturally occurring amino acid
  MISC_FEATURE (1030)..(1030): Xaa can be any naturally occurring amino acid except Pro or Gly
  MISC_FEATURE (1031)..(1031): Xaa can be any naturally occurring amino acid except Pro or Gly
  MISC_FEATURE (1032)..(1032): Xaa can be any naturally occurring amino acid except Pro or Gly
  MISC_FEATURE (1033)..(1033): Xaa can be any naturally occurring amino acid except Pro or Gly
  MISC_FEATURE (1035)..(1035): Xaa can be any naturally occurring amino acid
  MISC_FEATURE (1036)..(1036): Xaa can be any naturally occurring amino acid
  MISC_FEATURE (1037)..(1037): Xaa can be any naturally occurring amino acid
  MISC_FEATURE (1039)..(1039): Xaa can be any naturally occurring amino acid except Pro or Gly
  MISC_FEATURE (1040)..(1040): Xaa can be any naturally occurring amino acid except Pro or Gly
  MISC_FEATURE (1041)..(1041): Xaa can be any naturally occurring amino acid except Pro or Gly
  MISC_FEATURE (1042)..(1042): Xaa can be any naturally occurring amino acid except Pro or Gly
  MISC_FEATURE (1044)..(1044): Xaa can be any naturally occurring amino acid
  MISC_FEATURE (1045)..(1045): Xaa can be any naturally occurring amino acid
  MISC_FEATURE (1046)..(1046): Xaa can be any naturally occurring amino acid
  MISC_FEATURE (1048)..(1048): Xaa can be any naturally occurring amino acid except Pro or Gly
  MISC_FEATURE (1049)..(1049): Xaa can be any naturally occurring amino acid except Pro or Gly
  MISC_FEATURE (1050)..(1050): Xaa can be any naturally occurring amino acid except Pro or Gly
  MISC_FEATURE (1051)..(1051): Xaa can be any naturally occurring amino acid except Pro or Gly
  MISC_FEATURE (1053)..(1053): Xaa can be any naturally occurring amino acid
  MISC_FEATURE (1054)..(1054): Xaa can be any naturally occurring amino acid
  MISC_FEATURE (1055)..(1055): Xaa can be any naturally occurring amino acid
  MISC_FEATURE (1057)..(1057): Xaa can be any naturally occurring amino acid except Pro or Gly
  MISC_FEATURE (1058)..(1058): Xaa can be any naturally occurring amino acid except Pro or Gly
  MISC_FEATURE (1059)..(1059): Xaa can be any naturally occurring amino acid except Pro or Gly
  MISC_FEATURE (1060)..(1060): Xaa can be any naturally occurring amino acid except Pro or Gly
  MISC_FEATURE (1062)..(1062): Xaa can be any naturally occurring amino acid
  MISC_FEATURE (1063)..(1063): Xaa can be any naturally occurring amino acid
  MISC_FEATURE (1064)..(1064): Xaa can be any naturally occurring amino acid
  MISC_FEATURE (1066)..(1066): Xaa can be any naturally occurring amino acid except Pro or Gly
  MISC_FEATURE (1067)..(1067): Xaa can be any naturally occurring amino acid except Pro or Gly
  MISC_FEATURE (1068)..(1068): Xaa can be any naturally occurring amino acid except Pro or Gly
  MISC_FEATURE (1069)..(1069): Xaa can be any naturally occurring amino acid except Pro or Gly
  MISC_FEATURE (1071)..(1071): Xaa can be any naturally occurring amino acid
  MISC_FEATURE (1072)..(1072): Xaa can be any naturally occurring amino acid
  MISC_FEATURE (1073)..(1073): Xaa can be any naturally occurring amino acid
  MISC_FEATURE (1075)..(1075): Xaa can be any naturally occurring amino acid except Pro or Gly
  MISC_FEATURE (1076)..(1076): Xaa can be any naturally occurring amino acid except Pro or Gly
  MISC_FEATURE (1077)..(1077): Xaa can be any naturally occurring amino acid except Pro or Gly
  MISC_FEATURE (1078)..(1078): Xaa can be any naturally occurring amino acid except Pro or Gly
  MISC_FEATURE (1080)..(1080): Xaa can be any naturally occurring amino acid
  MISC_FEATURE (1081)..(1081): Xaa can be any naturally occurring amino acid
  MISC_FEATURE (1082)..(1082): Xaa can be any naturally occurring amino acid
  MISC_FEATURE (1084)..(1084): Xaa can be any naturally occurring amino acid except Pro or Gly
  MISC_FEATURE (1085)..(1085): Xaa can be any naturally occurring amino acid except Pro or Gly
  MISC_FEATURE (1086)..(1086): Xaa can be any naturally occurring amino acid except Pro or Gly
  MISC_FEATURE (1087)..(1087): Xaa can be any naturally occurring amino acid except Pro or Gly
  MISC_FEATURE (1089)..(1089): Xaa can be any naturally occurring amino acid
  MISC_FEATURE (1090)..(1090): Xaa can be any naturally occurring amino acid
  MISC_FEATURE (1091)..(1091): Xaa can be any naturally occurring amino acid
  MISC_FEATURE (1093)..(1093): Xaa can be any naturally occurring amino acid except Pro or Gly
  MISC_FEATURE (1094)..(1094): Xaa can be any naturally occurring amino acid except Pro or Gly
  MISC_FEATURE (1095)..(1095): Xaa can be any naturally occurring amino acid except Pro or Gly
  MISC_FEATURE (1096)..(1096): Xaa can be any naturally occurring amino acid except Pro or Gly
  MISC_FEATURE (1098)..(1098): Xaa can be any naturally occurring amino acid
  MISC_FEATURE (1099)..(1099): Xaa can be any naturally occurring amino acid
  MISC_FEATURE (1100)..(1100): Xaa can be any naturally occurring amino acid
  MISC_FEATURE (1102)..(1102): Xaa can be any naturally occurring amino acid except Pro or Gly
  MISC_FEATURE (1103)..(1103): Xaa can be any naturally occurring amino acid except Pro or Gly
  MISC_FEATURE (1104)..(1104): Xaa can be any naturally occurring amino acid except Pro or Gly
  MISC_FEATURE (1105)..(1105): Xaa can be any naturally occurring amino acid except Pro or Gly
  MISC_FEATURE (1107)..(1107): Xaa can be any naturally occurring amino acid
  MISC_FEATURE (1108)..(1108): Xaa can be any naturally occurring amino acid
  MISC_FEATURE (1109)..(1109): Xaa can be any naturally occurring amino acid
  MISC_FEATURE (1111)..(1111): Xaa can be any naturally occurring amino acid except Pro or Gly
  MISC_FEATURE (1112)..(1112): Xaa can be any naturally occurring amino acid except Pro or Gly
  MISC_FEATURE (1113)..(1113): Xaa can be any naturally occurring amino acid except Pro or Gly
  MISC_FEATURE (1114)..(1114): Xaa can be any naturally occurring amino acid except Pro or Gly
  MISC_FEATURE (1116)..(1116): Xaa can be any naturally occurring amino acid
  MISC_FEATURE (1117)..(1117): Xaa can be any naturally occurring amino acid
  MISC_FEATURE (1118)..(1118): Xaa can be any naturally occurring amino acid
  MISC_FEATURE (1120)..(1120): Xaa can be any naturally occurring amino acid except Pro or Gly
  MISC_FEATURE (1121)..(1121): Xaa can be any naturally occurring amino acid except Pro or Gly
  MISC_FEATURE (1122)..(1122): Xaa can be any naturally occurring amino acid except Pro or Gly
  MISC_FEATURE (1123)..(1123): Xaa can be any naturally occurring amino acid except Pro or Gly
  MISC_FEATURE (1125)..(1125): Xaa can be any naturally occurring amino acid
  MISC_FEATURE (1126)..(1126): Xaa can be any naturally occurring amino acid
  MISC_FEATURE (1127)..(1127): Xaa can be any naturally occurring amino acid
  MISC_FEATURE (1129)..(1129): Xaa can be any naturally occurring amino acid except Pro or Gly
  MISC_FEATURE (1130)..(1130): Xaa can be any naturally occurring amino acid except Pro or Gly
  MISC_FEATURE (1131)..(1131): Xaa can be any naturally occurring amino acid except Pro or Gly
  MISC_FEATURE (1132)..(1132): Xaa can be any naturally occurring amino acid except Pro or Gly
  MISC_FEATURE (1134)..(1134): Xaa can be any naturally occurring amino acid
  MISC_FEATURE (1135)..(1135): Xaa can be any naturally occurring amino acid
  MISC_FEATURE (1136)..(1136): Xaa can be any naturally occurring amino acid
  MISC_FEATURE (1138)..(1138): Xaa can be any naturally occurring amino acid except Pro or Gly
  MISC_FEATURE (1139)..(1139): Xaa can be any naturally occurring amino acid except Pro or Gly
  MISC_FEATURE (1140)..(1140): Xaa can be any naturally occurring amino acid except Pro or Gly
  MISC_FEATURE (1141)..(1141): Xaa can be any naturally occurring amino acid except Pro or Gly
  MISC_FEATURE (1143)..(1143): Xaa can be any naturally occurring amino acid
  MISC_FEATURE (1144)..(1144): Xaa can be any naturally occurring amino acid
  MISC_FEATURE (1145)..(1145): Xaa can be any naturally occurring amino acid
  MISC_FEATURE (1147)..(1147): Xaa can be any naturally occurring amino acid except Pro or Gly
  MISC_FEATURE (1148)..(1148): Xaa can be any naturally occurring amino acid except Pro or Gly
  MISC_FEATURE (1149)..(1149): Xaa can be any naturally occurring amino acid except Pro or Gly
  MISC_FEATURE (1150)..(1150): Xaa can be any naturally occurring amino acid except Pro or Gly
  MISC_FEATURE (1152)..(1152): Xaa can be any naturally occurring amino acid
  MISC_FEATURE (1153)..(1153): Xaa can be any naturally occurring amino acid
  MISC_FEATURE (1154)..(1154): Xaa can be any naturally occurring amino acid
  MISC_FEATURE (1156)..(1156): Xaa can be any naturally occurring amino acid except Pro or Gly
  MISC_FEATURE (1157)..(1157): Xaa can be any naturally occurring amino acid except Pro or Gly
  MISC_FEATURE (1158)..(1158): Xaa can be any naturally occurring amino acid except Pro or Gly
  MISC_FEATURE (1159)..(1159): Xaa can be any naturally occurring amino acid except Pro or Gly
  MISC_FEATURE (1161)..(1161): Xaa can be any naturally occurring amino acid
  MISC_FEATURE (1162)..(1162): Xaa can be any naturally occurring amino acid
  MISC_FEATURE (1163)..(1163): Xaa can be any naturally occurring amino acid
  MISC_FEATURE (1165)..(1165): Xaa can be any naturally occurring amino acid except Pro or Gly
  MISC_FEATURE (1166)..(1166): Xaa can be any naturally occurring amino acid except Pro or Gly
  MISC_FEATURE (1167)..(1167): Xaa can be any naturally occurring amino acid except Pro or Gly
  MISC_FEATURE (1168)..(1168): Xaa can be any naturally occurring amino acid except Pro or Gly
  MISC_FEATURE (1170)..(1170): Xaa can be any naturally occurring amino acid
  MISC_FEATURE (1171)..(1171): Xaa can be any naturally occurring amino acid
  MISC_FEATURE (1172)..(1172): Xaa can be any naturally occurring amino acid
  MISC_FEATURE (1174)..(1174): Xaa can be any naturally occurring amino acid except Pro or Gly
  MISC_FEATURE (1175)..(1175): Xaa can be any naturally occurring amino acid except Pro or Gly
  MISC_FEATURE (1176)..(1176): Xaa can be any naturally occurring amino acid except Pro or Gly
  MISC_FEATURE (1177)..(1177): Xaa can be any naturally occurring amino acid except Pro or Gly
  MISC_FEATURE (1179)..(1179): Xaa can be any naturally occurring amino acid
  MISC_FEATURE (1180)..(1180): Xaa can be any naturally occurring amino acid
  MISC_FEATURE (1181)..(1181): Xaa can be any naturally occurring amino acid
  MISC_FEATURE (1183)..(1183): Xaa can be any naturally occurring amino acid except Pro or Gly
  MISC_FEATURE (1184)..(1184): Xaa can be any naturally occurring amino acid except Pro or Gly
  MISC_FEATURE (1185)..(1185): Xaa can be any naturally occurring amino acid except Pro or Gly
  MISC_FEATURE (1186)..(1186): Xaa can be any naturally occurring amino acid except Pro or Gly
  MISC_FEATURE (1188)..(1188): Xaa can be any naturally occurring amino acid
  MISC_FEATURE (1189)..(1189): Xaa can be any naturally occurring amino acid
  MISC_FEATURE (1190)..(1190): Xaa can be any naturally occurring amino acid
  MISC_FEATURE (1192)..(1192): Xaa can be any naturally occurring amino acid except Pro or Gly
  MISC_FEATURE (1193)..(1193): Xaa can be any naturally occurring amino acid except Pro or Gly
  MISC_FEATURE (1194)..(1194): Xaa can be any naturally occurring amino acid except Pro or Gly
  MISC_FEATURE (1195)..(1195): Xaa can be any naturally occurring amino acid except Pro or Gly
  MISC_FEATURE (1197)..(1197): Xaa can be any naturally occurring amino acid
  MISC_FEATURE (1198)..(1198): Xaa can be any naturally occurring amino acid
  MISC_FEATURE (1199)..(1199): Xaa can be any naturally occurring amino acid
  MISC_FEATURE (1201)..(1201): Xaa can be any naturally occurring amino acid except Pro or Gly
  MISC_FEATURE (1202)..(1202): Xaa can be any naturally occurring amino acid except Pro or Gly
  MISC_FEATURE (1203)..(1203): Xaa can be any naturally occurring amino acid except Pro or Gly
  MISC_FEATURE (1204)..(1204): Xaa can be any naturally occurring amino acid except Pro or Gly
  MISC_FEATURE (1206)..(1206): Xaa can be any naturally occurring amino acid
  MISC_FEATURE (1207)..(1207): Xaa can be any naturally occurring amino acid
  MISC_FEATURE (1208)..(1208): Xaa can be any naturally occurring amino acid
  MISC_FEATURE (1210)..(1210): Xaa can be any naturally occurring amino acid except Pro or Gly
  MISC_FEATURE (1211)..(1211): Xaa can be any naturally occurring amino acid except Pro or Gly
  MISC_FEATURE (1212)..(1212): Xaa can be any naturally occurring amino acid except Pro or Gly
  MISC_FEATURE (1213)..(1213): Xaa can be any naturally occurring amino acid except Pro or Gly
  MISC_FEATURE (1215)..(1215): Xaa can be any naturally occurring amino acid
  MISC_FEATURE (1216)..(1216): Xaa can be any naturally occurring amino acid
  MISC_FEATURE (1217)..(1217): Xaa can be any naturally occurring amino acid
  MISC_FEATURE (1219)..(1219): Xaa can be any naturally occurring amino acid except Pro or Gly
  MISC_FEATURE (1220)..(1220): Xaa can be any naturally occurring amino acid except Pro or Gly
  MISC_FEATURE (1221)..(1221): Xaa can be any naturally occurring amino acid except Pro or Gly
  MISC_FEATURE (1222)..(1222): Xaa can be any naturally occurring amino acid except Pro or Gly
  MISC_FEATURE (1224)..(1224): Xaa can be any naturally occurring amino acid
  MISC_FEATURE (1225)..(1225): Xaa can be any naturally occurring amino acid
  MISC_FEATURE (1226)..(1226): Xaa can be any naturally occurring amino acid
  MISC_FEATURE (1228)..(1228): Xaa can be any naturally occurring amino acid except Pro or Gly
  MISC_FEATURE (1229)..(1229): Xaa can be any naturally occurring amino acid except Pro or Gly
  MISC_FEATURE (1230)..(1230): Xaa can be any naturally occurring amino acid except Pro or Gly
  MISC_FEATURE (1231)..(1231): Xaa can be any naturally occurring amino acid except Pro or Gly
  MISC_FEATURE (1233)..(1233): Xaa can be any naturally occurring amino acid
  MISC_FEATURE (1234)..(1234): Xaa can be any naturally occurring amino acid
  MISC_FEATURE (1235)..(1235): Xaa can be any naturally occurring amino acid
  MISC_FEATURE (1237)..(1237): Xaa can be any naturally occurring amino acid except Pro or Gly
  MISC_FEATURE (1238)..(1238): Xaa can be any naturally occurring amino acid except Pro or Gly
  MISC_FEATURE (1239)..(1239): Xaa can be any naturally occurring amino acid except Pro or Gly
  MISC_FEATURE (1240)..(1240): Xaa can be any naturally occurring amino acid except Pro or Gly
  MISC_FEATURE (1242)..(1242): Xaa can be any naturally occurring amino acid
  MISC_FEATURE (1243)..(1243): Xaa can be any naturally occurring amino acid
  MISC_FEATURE (1244)..(1244): Xaa can be any naturally occurring amino acid
  MISC_FEATURE (1246)..(1246): Xaa can be any naturally occurring amino acid except Pro or Gly
  MISC_FEATURE (1247)..(1247): Xaa can be any naturally occurring amino acid except Pro or Gly
  MISC_FEATURE (1248)..(1248): Xaa can be any naturally occurring amino acid except Pro or Gly
  MISC_FEATURE (1249)..(1249): Xaa can be any naturally occurring amino acid except Pro or Gly
  MISC_FEATURE (1251)..(1251): Xaa can be any naturally occurring amino acid
  MISC_FEATURE (1252)..(1252): Xaa can be any naturally occurring amino acid
  MISC_FEATURE (1253)..(1253): Xaa can be any naturally occurring amino acid
  MISC_FEATURE (1255)..(1255): Xaa can be any naturally occurring amino acid except Pro or Gly
  MISC_FEATURE (1256)..(1256): Xaa can be any naturally occurring amino acid except Pro or Gly
  MISC_FEATURE (1257)..(1257): Xaa can be any naturally occurring amino acid except Pro or Gly
  MISC_FEATURE (1258)..(1258): Xaa can be any naturally occurring amino acid except Pro or Gly
  MISC_FEATURE (1260)..(1260): Xaa can be any naturally occurring amino acid
  MISC_FEATURE (1261)..(1261): Xaa can be any naturally occurring amino acid
  MISC_FEATURE (1262)..(1262): Xaa can be any naturally occurring amino acid
  MISC_FEATURE (1264)..(1264): Xaa can be any naturally occurring amino acid except Pro or Gly
  MISC_FEATURE (1265)..(1265): Xaa can be any naturally occurring amino acid except Pro or Gly
  MISC_FEATURE (1266)..(1266): Xaa can be any naturally occurring amino acid except Pro or Gly
  MISC_FEATURE (1267)..(1267): Xaa can be any naturally occurring amino acid except Pro or Gly
  MISC_FEATURE (1269)..(1269): Xaa can be any naturally occurring amino acid
  MISC_FEATURE (1270)..(1270): Xaa can be any naturally occurring amino acid
  MISC_FEATURE (1271)..(1271): Xaa can be any naturally occurring amino acid
  MISC_FEATURE (1273)..(1273): Xaa can be any naturally occurring amino acid except Pro or Gly
  MISC_FEATURE (1274)..(1274): Xaa can be any naturally occurring amino acid except Pro or Gly
  MISC_FEATURE (1275)..(1275): Xaa can be any naturally occurring amino acid except Pro or Gly
  MISC_FEATURE (1276)..(1276): Xaa can be any naturally occurring amino acid except Pro or Gly
  MISC_FEATURE (1278)..(1278): Xaa can be any naturally occurring amino acid
  MISC_FEATURE (1279)..(1279): Xaa can be any naturally occurring amino acid
  MISC_FEATURE (1280)..(1280): Xaa can be any naturally occurring amino acid
  MISC_FEATURE (1282)..(1282): Xaa can be any naturally occurring amino acid except Pro or Gly
  MISC_FEATURE (1283)..(1283): Xaa can be any naturally occurring amino acid except Pro or Gly
  MISC_FEATURE (1284)..(1284): Xaa can be any naturally occurring amino acid except Pro or Gly
  MISC_FEATURE (1285)..(1285): Xaa can be any naturally occurring amino acid except Pro or Gly
  MISC_FEATURE (1287)..(1287): Xaa can be any naturally occurring amino acid
  MISC_FEATURE (1288)..(1288): Xaa can be any naturally occurring amino acid
  MISC_FEATURE (1289)..(1289): Xaa can be any naturally occurring amino acid
  MISC_FEATURE (1291)..(1291): Xaa can be any naturally occurring amino acid except Pro or Gly
  MISC_FEATURE (1292)..(1292): Xaa can be any naturally occurring amino acid except Pro or Gly
  MISC_FEATURE (1293)..(1293): Xaa can be any naturally occurring amino acid except Pro or Gly
  MISC_FEATURE (1294)..(1294): Xaa can be any naturally occurring amino acid except Pro or Gly
  MISC_FEATURE (1296)..(1296): Xaa can be any naturally occurring amino acid
  MISC_FEATURE (1297)..(1297): Xaa can be any naturally occurring amino acid
  MISC_FEATURE (1298)..(1298): Xaa can be any naturally occurring amino acid
  MISC_FEATURE (1300)..(1300): Xaa can be any naturally occurring amino acid except Pro or Gly
  MISC_FEATURE (1301)..(1301): Xaa can be any naturally occurring amino acid except Pro or Gly
  MISC_FEATURE (1302)..(1302): Xaa can be any naturally occurring amino acid except Pro or Gly
  MISC_FEATURE (1303)..(1303): Xaa can be any naturally occurring amino acid except Pro or Gly
  MISC_FEATURE (1305)..(1305): Xaa can be any naturally occurring amino acid
  MISC_FEATURE (1306)..(1306): Xaa can be any naturally occurring amino acid
  MISC_FEATURE (1307)..(1307): Xaa can be any naturally occurring amino acid
  MISC_FEATURE (1309)..(1309): Xaa can be any naturally occurring amino acid except Pro or Gly
  MISC_FEATURE (1310)..(1310): Xaa can be any naturally occurring amino acid except Pro or Gly
  MISC_FEATURE (1311)..(1311): Xaa can be any naturally occurring amino acid except Pro or Gly
  MISC_FEATURE (1312)..(1312): Xaa can be any naturally occurring amino acid except Pro or Gly
  MISC_FEATURE (1314)..(1314): Xaa can be any naturally occurring amino acid
  MISC_FEATURE (1315)..(1315): Xaa can be any naturally occurring amino acid
  MISC_FEATURE (1316)..(1316): Xaa can be any naturally occurring amino acid
  MISC_FEATURE (1318)..(1318): Xaa can be any naturally occurring amino acid except Pro or Gly
  MISC_FEATURE (1319)..(1319): Xaa can be any naturally occurring amino acid except Pro or Gly
  MISC_FEATURE (1320)..(1320): Xaa can be any naturally occurring amino acid except Pro or Gly
  MISC_FEATURE (1321)..(1321): Xaa can be any naturally occurring amino acid except Pro or Gly
  MISC_FEATURE (1323)..(1323): Xaa can be any naturally occurring amino acid
  MISC_FEATURE (1324)..(1324): Xaa can be any naturally occurring amino acid
  MISC_FEATURE (1325)..(1325): Xaa can be any naturally occurring amino acid
  MISC_FEATURE (1327)..(1327): Xaa can be any naturally occurring amino acid except Pro or Gly
  MISC_FEATURE (1328)..(1328): Xaa can be any naturally occurring amino acid except Pro or Gly
  MISC_FEATURE (1329)..(1329): Xaa can be any naturally occurring amino acid except Pro or Gly
  MISC_FEATURE (1330)..(1330): Xaa can be any naturally occurring amino acid except Pro or Gly
  MISC_FEATURE (1332)..(1332): Xaa can be any naturally occurring amino acid
  MISC_FEATURE (1333)..(1333): Xaa can be any naturally occurring amino acid
  MISC_FEATURE (1334)..(1334): Xaa can be any naturally occurring amino acid
  MISC_FEATURE (1336)..(1336): Xaa can be any naturally occurring amino acid except Pro or Gly
  MISC_FEATURE (1337)..(1337): Xaa can be any naturally occurring amino acid except Pro or Gly
  MISC_FEATURE (1338)..(1338): Xaa can be any naturally occurring amino acid except Pro or Gly
  MISC_FEATURE (1339)..(1339): Xaa can be any naturally occurring amino acid except Pro or Gly
  MISC_FEATURE (1341)..(1341): Xaa can be any naturally occurring amino acid
  MISC_FEATURE (1342)..(1342): Xaa can be any naturally occurring amino acid
  MISC_FEATURE (1343)..(1343): Xaa can be any naturally occurring amino acid
  MISC_FEATURE (1345)..(1345): Xaa can be any naturally occurring amino acid except Pro or Gly
  MISC_FEATURE (1346)..(1346): Xaa can be any naturally occurring amino acid except Pro or Gly
  MISC_FEATURE (1347)..(1347): Xaa can be any naturally occurring amino acid except Pro or Gly
  MISC_FEATURE (1348)..(1348): Xaa can be any naturally occurring amino acid except Pro or Gly
  MISC_FEATURE (1350)..(1350): Xaa can be any naturally occurring amino acid
  MISC_FEATURE (1351)..(1351): Xaa can be any naturally occurring amino acid
  MISC_FEATURE (1352)..(1352): Xaa can be any naturally occurring amino acid
  MISC_FEATURE (1354)..(1354): Xaa can be any naturally occurring amino acid except Pro or Gly
  MISC_FEATURE (1355)..(1355): Xaa can be any naturally occurring amino acid except Pro or Gly
  MISC_FEATURE (1356)..(1356): Xaa can be any naturally occurring amino acid except Pro or Gly
  MISC_FEATURE (1357)..(1357): Xaa can be any naturally occurring amino acid except Pro or Gly
  MISC_FEATURE (1359)..(1359): Xaa can be any naturally occurring amino acid
  MISC_FEATURE (1360)..(1360): Xaa can be any naturally occurring amino acid
  MISC_FEATURE (1361)..(1361): Xaa can be any naturally occurring amino acid
  MISC_FEATURE (1363)..(1363): Xaa can be any naturally occurring amino acid except Pro or Gly
  MISC_FEATURE (1364)..(1364): Xaa can be any naturally occurring amino acid except Pro or Gly
  MISC_FEATURE (1365)..(1365): Xaa can be any naturally occurring amino acid except Pro or Gly
  MISC_FEATURE (1366)..(1366): Xaa can be any naturally occurring amino acid except Pro or Gly
  MISC_FEATURE (1368)..(1368): Xaa can be any naturally occurring amino acid
  MISC_FEATURE (1369)..(1369): Xaa can be any naturally occurring amino acid
  MISC_FEATURE (1370)..(1370): Xaa can be any naturally occurring amino acid
  MISC_FEATURE (1372)..(1372): Xaa can be any naturally occurring amino acid except Pro or Gly
  MISC_FEATURE (1373)..(1373): Xaa can be any naturally occurring amino acid except Pro or Gly
  MISC_FEATURE (1374)..(1374): Xaa can be any naturally occurring amino acid except Pro or Gly
  MISC_FEATURE (1375)..(1375): Xaa can be any naturally occurring amino acid except Pro or Gly
  MISC_FEATURE (1377)..(1377): Xaa can be any naturally occurring amino acid
  MISC_FEATURE (1378)..(1378): Xaa can be any naturally occurring amino acid
  MISC_FEATURE (1379)..(1379): Xaa can be any naturally occurring amino acid
  MISC_FEATURE (1381)..(1381): Xaa can be any naturally occurring amino acid except Pro or Gly
  MISC_FEATURE (1382)..(1382): Xaa can be any naturally occurring amino acid except Pro or Gly
  MISC_FEATURE (1383)..(1383): Xaa can be any naturally occurring amino acid except Pro or Gly
  MISC_FEATURE (1384)..(1384): Xaa can be any naturally occurring amino acid except Pro or Gly
  MISC_FEATURE (1386)..(1386): Xaa can be any naturally occurring amino acid
  MISC_FEATURE (1387)..(1387): Xaa can be any naturally occurring amino acid
  MISC_FEATURE (1388)..(1388): Xaa can be any naturally occurring amino acid
  MISC_FEATURE (1390)..(1390): Xaa can be any naturally occurring amino acid except Pro or Gly
  MISC_FEATURE (1391)..(1391): Xaa can be any naturally occurring amino acid except Pro or Gly
  MISC_FEATURE (1392)..(1392): Xaa can be any naturally occurring amino acid except Pro or Gly
  MISC_FEATURE (1393)..(1393): Xaa can be any naturally occurring amino acid except Pro or Gly
  MISC_FEATURE (1395)..(1395): Xaa can be any naturally occurring amino acid
  MISC_FEATURE (1396)..(1396): Xaa can be any naturally occurring amino acid
  MISC_FEATURE (1397)..(1397): Xaa can be any naturally occurring amino acid
  MISC_FEATURE (1399)..(1399): Xaa can be any naturally occurring amino acid except Pro or Gly
  MISC_FEATURE (1400)..(1400): Xaa can be any naturally occurring amino acid except Pro or Gly
  MISC_FEATURE (1401)..(1401): Xaa can be any naturally occurring amino acid except Pro or Gly
  MISC_FEATURE (1402)..(1402): Xaa can be any naturally occurring amino acid except Pro or Gly
  MISC_FEATURE (1404)..(1404): Xaa can be any naturally occurring amino acid
  MISC_FEATURE (1405)..(1405): Xaa can be any naturally occurring amino acid
  MISC_FEATURE (1406)..(1406): Xaa can be any naturally occurring amino acid
  MISC_FEATURE (1408)..(1408): Xaa can be any naturally occurring amino acid except Pro or Gly
  MISC_FEATURE (1409)..(1409): Xaa can be any naturally occurring amino acid except Pro or Gly
  MISC_FEATURE (1410)..(1410): Xaa can be any naturally occurring amino acid except Pro or Gly
  MISC_FEATURE (1411)..(1411): Xaa can be any naturally occurring amino acid except Pro or Gly
  MISC_FEATURE (1413)..(1413): Xaa can be any naturally occurring amino acid
  MISC_FEATURE (1414)..(1414): Xaa can be any naturally occurring amino acid
  MISC_FEATURE (1415)..(1415): Xaa can be any naturally occurring amino acid
  MISC_FEATURE (1417)..(1417): Xaa can be any naturally occurring amino acid except Pro or Gly
  MISC_FEATURE (1418)..(1418): Xaa can be any naturally occurring amino acid except Pro or Gly
  MISC_FEATURE (1419)..(1419): Xaa can be any naturally occurring amino acid except Pro or Gly
  MISC_FEATURE (1420)..(1420): Xaa can be any naturally occurring amino acid except Pro or Gly
  MISC_FEATURE (1422)..(1422): Xaa can be any naturally occurring amino acid
  MISC_FEATURE (1423)..(1423): Xaa can be any naturally occurring amino acid
  MISC_FEATURE (1424)..(1424): Xaa can be any naturally occurring amino acid
  MISC_FEATURE (1426)..(1426): Xaa can be any naturally occurring amino acid except Pro or Gly
  MISC_FEATURE (1427)..(1427): Xaa can be any naturally occurring amino acid except Pro or Gly
  MISC_FEATURE (1428)..(1428): Xaa can be any naturally occurring amino acid except Pro or Gly
  MISC_FEATURE (1429)..(1429): Xaa can be any naturally occurring amino acid except Pro or Gly
  MISC_FEATURE (1431)..(1431): Xaa can be any naturally occurring amino acid
  MISC_FEATURE (1432)..(1432): Xaa can be any naturally occurring amino acid
  MISC_FEATURE (1433)..(1433): Xaa can be any naturally occurring amino acid
  MISC_FEATURE (1435)..(1435): Xaa can be any naturally occurring amino acid except Pro or Gly
  MISC_FEATURE (1436)..(1436): Xaa can be any naturally occurring amino acid except Pro or Gly
  MISC_FEATURE (1437)..(1437): Xaa can be any naturally occurring amino acid except Pro or Gly
  MISC_FEATURE (1438)..(1438): Xaa can be any naturally occurring amino acid except Pro or Gly
  MISC_FEATURE (1440)..(1440): Xaa can be any naturally occurring amino acid
XXPXXXXGXXXPXXXXGXXXPXXXXGXXXPXXXXGXXXPXXXXGXXXPXXXXGXXXPXXXXGXXXPXXXXGXXXPXXXXGXXXPXXXXGXXXPXXXXGXXXPXXXXGXXXPXXXXGXXXPXXXXGXXXPXXXXGXXXPXXXXGXXXPXXXXGXXXPXXXXGXXXPXXXXGXXXPXXXXGXXXPXXXXGXXXPXXXXGXXXPXXXXGXXXPXXXXGXXXPXXXXGXXXPXXXXGXXXPXXXXGXXXPXXXXGXXXPXXXXGXXXPXXXXGXXXPXXXXGXXXPXXXXGXXXPXXXXGXXXPXXXXGXXXPXXXXGXXXPXXXXGXXXPXXXXGXXXPXXXXGXXXPXXXXGXXXPXXXXGXXXPXXXXGXXXPXXXXGXXXPXXXXGXXXPXXXXGXXXPXXXXGXXXPXXXXGXXXPXXXXGXXXPXXXXGXXXPXXXXGXXXPXXXXGXXXPXXXXGXXXPXXXXGXXXPXXXXGXXXPXXXXGXXXPXXXXGXXXPXXXXGXXXPXXXXGXXXPXXXXGXXXPXXXXGXXXPXXXXGXXXPXXXXGXXXPXXXXGXXXPXXXXGXXXPXXXXGXXXPXXXXGXXXPXXXXGXXXPXXXXGXXXPXXXXGXXXPXXXXGXXXPXXXXGXXXPXXXXGXXXPXXXXGXXXPXXXXGXXXPXXXXGXXXPXXXXGXXXPXXXXGXXXPXXXXGXXXPXXXXGXXXPXXXXGXXXPXXXXGXXXPXXXXGXXXPXXXXGXXXPXXXXGXXXPXXXXGXXXPXXXXGXXXPXXXXGXXXPXXXXGXXXPXXXXGXXXPXXXXGXXXPXXXXGXXXPXXXXGXXXPXXXXGXXXPXXXXGXXXPXXXXGXXXPXXXXGXXXPXXXXGXXXPXXXXGXXXPXXXXGXXXPXXXXGXXXPXXXXGXXXPXXXXGXXXPXXXXGXXXPXXXXGXXXPXXXXGXXXPXXXXGXXXPXXXXGXXXPXXXXGXXXPXXXXGXXXPXXXXGXXXPXXXXGXXXPXXXXGXXXPXXXXGXXXPXXXXGXXXPXXXXGXXXPXXXXGXXXPXXXXGXXXPXXXXGXXXPXXXXGXXXPXXXXGXXXPXXXXGXXXPXXXXGXXXPXXXXGXXXPXXXXGXXXPXXXXGXXXPXXXXGXXXPXXXXGXXXPXXXXGXXXPXXXXGXXXPXXXXGXXXPXXXXGXXXPXXXXGXXXPXXXXGXXXPXXXXGXXXPXXXXGXXXPXXXXGXXXPXXXXGXXXPXXXXGXXXPXXXXGXXXPXXXXGXXXPXXXXGXXXPXXXXGXXXPXXXXGXXXPXXXXGXXXPXXXXGXXXPXXXXGXXXPXXXXGXXXPXXXXGXXXPXXXXGXXXPXXXXGXXXPXXXXGXXXPXXXXGXXXPXXXXGXXXPXXXXGXXXPXXXXGXXXPXXXXGXXXPXXXXGXXXPXXXXGXXXPXXXXGXXXPXXXXGXXXPXXXXGX

SEQ ID NO: 149 - protein, 960 aa, Artificial Sequence
  elastin-like polypeptide
  MISC_FEATURE (1)..(1): Xaa can be any naturally occurring amino acid
  MISC_FEATURE (2)..(2): Xaa can be any naturally occurring amino acid
  MISC_FEATURE (4)..(4): Xaa can be any naturally occurring amino acid except Pro or Gly
  MISC_FEATURE (6)..(6): Xaa can be any naturally occurring amino acid
  MISC_FEATURE (7)..(7): Xaa can be any naturally occurring amino acid
  MISC_FEATURE (8)..(8): Xaa can be any naturally occurring amino acid
  MISC_FEATURE (10)..(10): Xaa can be any naturally occurring amino acid except Pro or Gly
  MISC_FEATURE (12)..(12): Xaa can be any naturally occurring amino acid
  MISC_FEATURE (13)..(13): Xaa can be any naturally occurring amino acid
  MISC_FEATURE (14)..(14): Xaa can be any naturally occurring amino acid
  MISC_FEATURE (16)..(16): Xaa can be any naturally occurring amino acid except Pro or Gly
  MISC_FEATURE (18)..(18): Xaa can be any naturally occurring amino acid
  MISC_FEATURE (19)..(19): Xaa can be any naturally occurring amino acid
  MISC_FEATURE (20)..(20): Xaa can be any naturally occurring amino acid
  MISC_FEATURE (22)..(22): Xaa can be any naturally occurring amino acid except Pro or Gly
  MISC_FEATURE (24)..(24): Xaa can be any naturally occurring amino acid
  MISC_FEATURE (25)..(25): Xaa can be any naturally occurring amino acid
  MISC_FEATURE (26)..(26): Xaa can be any naturally occurring amino acid
  MISC_FEATURE (28)..(28): Xaa can be any naturally occurring amino acid except Pro or Gly
  MISC_FEATURE (30)..(30): Xaa can be any naturally occurring amino acid
  MISC_FEATURE (31)..(31): Xaa can be any naturally occurring amino acid
  MISC_FEATURE (32)..(32): Xaa can be any naturally occurring amino acid
  MISC_FEATURE (34)..(34): Xaa can be any naturally occurring amino acid except Pro or Gly
  MISC_FEATURE (36)..(36): Xaa can be any naturally occurring amino acid
  MISC_FEATURE (37)..(37): Xaa can be any naturally occurring amino acid
  MISC_FEATURE (38)..(38): Xaa can be any naturally occurring amino acid
  MISC_FEATURE (40)..(40): Xaa can be any naturally occurring amino acid except Pro or Gly
  MISC_FEATURE (42)..(42): Xaa can be any naturally occurring amino acid
  MISC_FEATURE (43)..(43): Xaa can be any naturally occurring amino acid
  MISC_FEATURE (44)..(44): Xaa can be any naturally occurring amino acid
  MISC_FEATURE (46)..(46): Xaa can be any naturally occurring amino acid except Pro or Gly
  MISC_FEATURE (48)..(48): Xaa can be any naturally occurring amino acid
  MISC_FEATURE (49)..(49): Xaa can be any naturally occurring amino acid
  MISC_FEATURE (50)..(50): Xaa can be any naturally occurring amino acid
  MISC_FEATURE (52)..(52): Xaa can be any naturally occurring amino acid except Pro or Gly
  MISC_FEATURE (54)..(54): Xaa can be any naturally occurring amino acid
  MISC_FEATURE (55)..(55): Xaa can be any naturally occurring amino acid
  MISC_FEATURE (56)..(56): Xaa can be any naturally occurring amino acid
  MISC_FEATURE (58)..(58): Xaa can be any naturally occurring amino acid except Pro or Gly
  MISC_FEATURE (60)..(60): Xaa can be any naturally occurring amino acid
  MISC_FEATURE (61)..(960): May be present or absent in groups of the repeat unit Xaa Xaa Pro Xaa Gly Xaa Xaa
  MISC_FEATURE (61)..(61): Xaa can be any naturally occurring amino acid
  MISC_FEATURE (62)..(62): Xaa can be any naturally occurring amino acid
  MISC_FEATURE (64)..(64): Xaa can be any naturally occurring amino acid except Pro or Gly
  MISC_FEATURE (66)..(66): Xaa can be any naturally occurring amino acid
  MISC_FEATURE (67)..(67): Xaa can be any naturally occurring amino acid
  MISC_FEATURE (68)..(68): Xaa can be any naturally occurring amino acid
  MISC_FEATURE (70)..(70): Xaa can be any naturally occurring amino acid except Pro or Gly
  MISC_FEATURE (72)..(72): Xaa can be any naturally occurring amino acid
  MISC_FEATURE (73)..(73): Xaa can be any naturally occurring amino acid
  MISC_FEATURE (74)..(74): Xaa can be any naturally occurring amino acid
  MISC_FEATURE (76)..(76): Xaa can be any naturally occurring amino acid except Pro or Gly
  MISC_FEATURE (78)..(78): Xaa can be any naturally occurring amino acid
  MISC_FEATURE (79)..(79): Xaa can be any naturally occurring amino acid
  MISC_FEATURE (80)..(80): Xaa can be any naturally occurring amino acid
  MISC_FEATURE (82)..(82): Xaa can be any naturally occurring amino acid except Pro or Gly
  MISC_FEATURE (84)..(84): Xaa can be any naturally occurring amino acid
  MISC_FEATURE (85)..(85): Xaa can be any naturally occurring amino acid
  MISC_FEATURE (86)..(86): Xaa can be any naturally occurring amino acid
  MISC_FEATURE (88)..(88): Xaa can be any naturally occurring amino acid except Pro or Gly
  MISC_FEATURE (90)..(90): Xaa can be any naturally occurring amino acid
  MISC_FEATURE (91)..(91): Xaa can be any naturally occurring amino acid
  MISC_FEATURE (92)..(92): Xaa can be any naturally occurring amino acid
  MISC_FEATURE (94)..(94): Xaa can be any naturally occurring amino acid except Pro or Gly
  MISC_FEATURE (96)..(96): Xaa can be any naturally occurring amino acid
  MISC_FEATURE (97)..(97): Xaa can be any naturally occurring amino acid
  MISC_FEATURE (98)..(98): Xaa can be any naturally occurring amino acid
  MISC_FEATURE (100)..(100): Xaa can be any naturally occurring amino acid except Pro or Gly
  MISC_FEATURE (102)..(102): Xaa can be any naturally occurring amino acid
  MISC_FEATURE (103)..(103): Xaa can be any naturally occurring amino acid
  MISC_FEATURE (104)..(104): Xaa can be any naturally occurring amino acid
  MISC_FEATURE (106)..(106): Xaa can be any naturally occurring amino acid except Pro or Gly
  MISC_FEATURE (108)..(108): Xaa can be any naturally occurring amino acid
  MISC_FEATURE (109)..(109): Xaa can be any naturally occurring amino acid
  MISC_FEATURE (110)..(110): Xaa can be any naturally occurring amino acid
  MISC_FEATURE (112)..(112): Xaa can be any naturally occurring amino acid except Pro or Gly
  MISC_FEATURE (114)..(114): Xaa can be any naturally occurring amino acid
  MISC_FEATURE (115)..(115): Xaa can be any naturally occurring amino acid
  MISC_FEATURE (116)..(116): Xaa can be any naturally occurring amino acid
  MISC_FEATURE (118)..(118): Xaa can be any naturally occurring amino acid except Pro or Gly
  MISC_FEATURE (120)..(120): Xaa can be any naturally occurring amino acid
  MISC_FEATURE (121)..(121): Xaa can be any naturally occurring amino acid
  MISC_FEATURE (122)..(122): Xaa can be any naturally occurring amino acid
  MISC_FEATURE (124)..(124): Xaa can be any naturally occurring amino acid except Pro or Gly
  MISC_FEATURE (126)..(126): Xaa can be any naturally occurring amino acid
  MISC_FEATURE (127)..(127): Xaa can be any naturally occurring amino acid
  MISC_FEATURE (128)..(128): Xaa can be any naturally occurring amino acid
  MISC_FEATURE (130)..(130): Xaa can be any naturally occurring amino acid except Pro or Gly
  MISC_FEATURE (132)..(132): Xaa can be any naturally occurring amino acid
  MISC_FEATURE (133)..(133): Xaa can be any naturally occurring amino acid
  MISC_FEATURE (134)..(134): Xaa can be any naturally occurring amino acid
  MISC_FEATURE (136)..(136): Xaa can be any naturally occurring amino acid except Pro or Gly
  MISC_FEATURE (138)..(138): Xaa can be any naturally occurring amino acid
  MISC_FEATURE (139)..(139): Xaa can be any naturally occurring amino acid
  MISC_FEATURE (140)..(140): Xaa can be any naturally occurring amino acid
  MISC_FEATURE (142)..(142): Xaa can be any naturally occurring amino acid except Pro or Gly
  MISC_FEATURE (144)..(144): Xaa can be any naturally occurring amino acid
  MISC_FEATURE (145)..(145): Xaa can be any naturally occurring amino acid
  MISC_FEATURE (146)..(146): Xaa can be any naturally occurring amino acid
  MISC_FEATURE (148)..(148): Xaa can be any naturally occurring amino acid except Pro or Gly
  MISC_FEATURE (150)..(150): Xaa can be any naturally occurring amino acid
  MISC_FEATURE (151)..(151): Xaa can be any naturally occurring amino acid
  MISC_FEATURE (152)..(152): Xaa can be any naturally occurring amino acid
  MISC_FEATURE (154)..(154): Xaa can be any naturally occurring amino acid except Pro or Gly
  MISC_FEATURE (156)..(156): Xaa can be any naturally occurring amino acid
  MISC_FEATURE (157)..(157): Xaa can be any naturally occurring amino acid
  MISC_FEATURE (158)..(158): Xaa can be any naturally occurring amino acid
  MISC_FEATURE (160)..(160): Xaa can be any naturally occurring amino acid except Pro or Gly
  MISC_FEATURE (162)..(162): Xaa can be any naturally occurring amino acid
  MISC_FEATURE (163)..(163): Xaa can be any naturally occurring amino acid
  MISC_FEATURE (164)..(164): Xaa can be any naturally occurring amino acid
  MISC_FEATURE (166)..(166): Xaa can be any naturally occurring amino acid except Pro or Gly
  MISC_FEATURE (168)..(168): Xaa can be any naturally occurring amino acid
  MISC_FEATURE (169)..(169): Xaa can be any naturally occurring amino acid
  MISC_FEATURE (170)..(170): Xaa can be any naturally occurring amino acid
  MISC_FEATURE (172)..(172): Xaa can be any naturally occurring amino acid except Pro or Gly
  MISC_FEATURE (174)..(174): Xaa can be any naturally occurring amino acid
  MISC_FEATURE (175)..(175): Xaa can be any naturally occurring amino acid
  MISC_FEATURE (176)..(176): Xaa can be any naturally occurring amino acid
  MISC_FEATURE (178)..(178): Xaa can be any naturally occurring amino acid except Pro or Gly
  MISC_FEATURE (180)..(180): Xaa can be any naturally occurring amino acid
  MISC_FEATURE (181)..(181): Xaa can be any naturally occurring amino acid
  MISC_FEATURE (182)..(182): Xaa can be any naturally occurring amino acid
  MISC_FEATURE (184)..(184): Xaa can be any naturally occurring amino acid except Pro or Gly
  MISC_FEATURE (186)..(186): Xaa can be any naturally occurring amino acid
  MISC_FEATURE (187)..(187): Xaa can be any naturally occurring amino acid
  MISC_FEATURE (188)..(188): Xaa can be any naturally occurring amino acid
  MISC_FEATURE (190)..(190): Xaa can be any naturally occurring amino acid except Pro or Gly
  MISC_FEATURE (192)..(192): Xaa can be any naturally occurring amino acid
  MISC_FEATURE (193)..(193): Xaa can be any naturally occurring amino acid
  MISC_FEATURE (194)..(194): Xaa can be any naturally occurring amino acid
  MISC_FEATURE (196)..(196): Xaa can be any naturally occurring amino acid except Pro or Gly
  MISC_FEATURE (198)..(198): Xaa can be any naturally occurring amino acid
  MISC_FEATURE (199)..(199): Xaa can be any naturally occurring amino acid
  MISC_FEATURE (200)..(200): Xaa can be any naturally occurring amino acid
  MISC_FEATURE (202)..(202): Xaa can be any naturally occurring amino acid except Pro or Gly
  MISC_FEATURE (204)..(204): Xaa can be any naturally occurring amino acid
  MISC_FEATURE (205)..(205): Xaa can be any naturally occurring amino acid
  MISC_FEATURE (206)..(206): Xaa can be any naturally occurring amino acid
  MISC_FEATURE (208)..(208): Xaa can be any naturally occurring amino acid except Pro or Gly
  MISC_FEATURE (210)..(210): Xaa can be any naturally occurring amino acid
  MISC_FEATURE (211)..(211): Xaa can be any naturally occurring amino acid
  MISC_FEATURE (212)..(212): Xaa can be any naturally occurring amino acid
  MISC_FEATURE (214)..(214): Xaa can be any naturally occurring amino acid except Pro or Gly
  MISC_FEATURE (216)..(216): Xaa can be any naturally occurring amino acid
  MISC_FEATURE (217)..(217): Xaa can be any naturally occurring amino acid
  MISC_FEATURE (218)..(218): Xaa can be any naturally occurring amino acid
  MISC_FEATURE (220)..(220): Xaa can be any naturally occurring amino acid except Pro or Gly
  MISC_FEATURE (222)..(222): Xaa can be any naturally occurring amino acid
  MISC_FEATURE (223)..(223): Xaa can be any naturally occurring amino acid
  MISC_FEATURE (224)..(224): Xaa can be any naturally occurring amino acid
  MISC_FEATURE (226)..(226): Xaa can be any naturally occurring amino acid except Pro or Gly
  MISC_FEATURE (228)..(228): Xaa can be any naturally occurring amino acid
  MISC_FEATURE (229)..(229): Xaa can be any naturally occurring amino acid
  MISC_FEATURE (230)..(230): Xaa can be any naturally occurring amino acid
  MISC_FEATURE (232)..(232): Xaa can be any naturally occurring amino acid except Pro or Gly
  MISC_FEATURE (234)..(234): Xaa can be any naturally occurring amino acid
  MISC_FEATURE (235)..(235): Xaa can be any naturally occurring amino acid
  MISC_FEATURE (236)..(236): Xaa can be any naturally occurring amino acid
  MISC_FEATURE (238)..(238): Xaa can be any naturally occurring amino acid except Pro or Gly
  MISC_FEATURE (240)..(240): Xaa can be any naturally occurring amino acid
  MISC_FEATURE (241)..(241): Xaa can be any naturally occurring amino acid
  MISC_FEATURE (242)..(242): Xaa can be any naturally occurring amino acid
  MISC_FEATURE (244)..(244): Xaa can be any naturally occurring amino acid except Pro or Gly
  MISC_FEATURE (246)..(246): Xaa can be any naturally occurring amino acid
  MISC_FEATURE (247)..(247): Xaa can be any naturally occurring amino acid
  MISC_FEATURE (248)..(248): Xaa can be any naturally occurring amino acid
  MISC_FEATURE (250)..(250): Xaa can be any naturally occurring amino acid except Pro or Gly
  MISC_FEATURE (252)..(252): Xaa can be any naturally occurring amino acid
  MISC_FEATURE (253)..(253): Xaa can be any naturally occurring amino acid
  MISC_FEATURE (254)..(254): Xaa can be any naturally occurring amino acid
  MISC_FEATURE (256)..(256): Xaa can be any naturally occurring amino acid except Pro or Gly
  MISC_FEATURE (258)..(258): Xaa can be any naturally occurring amino acid
  MISC_FEATURE (259)..(259): Xaa can be any naturally occurring amino acid
  MISC_FEATURE (260)..(260): Xaa can be any naturally occurring amino acid
  MISC_FEATURE (262)..(262): Xaa can be any naturally occurring amino acid except Pro or Gly
  MISC_FEATURE (264)..(264): Xaa can be any naturally occurring amino acid
  MISC_FEATURE (265)..(265): Xaa can be any naturally occurring amino acid
  MISC_FEATURE (266)..(266): Xaa can be any naturally occurring amino acid
  MISC_FEATURE (268)..(268): Xaa can be any naturally occurring amino acid except Pro or Gly
  MISC_FEATURE (270)..(270): Xaa can be any naturally occurring amino acid
  MISC_FEATURE (271)..(271): Xaa can be any naturally occurring amino acid
  MISC_FEATURE (272)..(272): Xaa can be any naturally occurring amino acid
  MISC_FEATURE (274)..(274): Xaa can be any naturally occurring amino acid except Pro or Gly
  MISC_FEATURE (276)..(276): Xaa can be any naturally occurring amino acid
  MISC_FEATURE (277)..(277): Xaa can be any naturally occurring amino acid
  MISC_FEATURE (278)..(278): Xaa can be any naturally occurring amino acid
  MISC_FEATURE (280)..(280): Xaa can be any naturally occurring amino acid except Pro or Gly
  MISC_FEATURE (282)..(282): Xaa can be any naturally occurring amino acid
  MISC_FEATURE (283)..(283): Xaa can be any naturally occurring amino acid
  MISC_FEATURE (284)..(284): Xaa can be any naturally occurring amino acid
  MISC_FEATURE (286)..(286): Xaa can be any naturally occurring amino acid except Pro or Gly
  MISC_FEATURE (288)..(288): Xaa can be any naturally occurring amino acid
  MISC_FEATURE (289)..(289): Xaa can be any naturally occurring amino acid
  MISC_FEATURE (290)..(290): Xaa can be any naturally occurring amino acid
  MISC_FEATURE (292)..(292): Xaa can be any naturally occurring amino acid except Pro or Gly
  MISC_FEATURE (294)..(294): Xaa can be any naturally occurring amino acid
  MISC_FEATURE (295)..(295): Xaa can be any naturally occurring amino acid
  MISC_FEATURE (296)..(296): Xaa can be any naturally occurring amino acid
  MISC_FEATURE (298)..(298): Xaa can be any naturally occurring amino acid except Pro or Gly
  MISC_FEATURE (300)..(300): Xaa can be any naturally occurring amino acid
  MISC_FEATURE (301)..(301): Xaa can be any naturally occurring amino acid
  MISC_FEATURE (302)..(302): Xaa can be any naturally occurring amino acid
  MISC_FEATURE (304)..(304): Xaa can be any naturally occurring amino acid except Pro or Gly
  MISC_FEATURE (306)..(306): Xaa can be any naturally occurring amino acid
  MISC_FEATURE (307)..(307): Xaa can be any naturally occurring amino acid
  MISC_FEATURE (308)..(308): Xaa can be any naturally occurring amino acid
  MISC_FEATURE (310)..(310): Xaa can be any naturally occurring amino acid except Pro or Gly
  MISC_FEATURE (312)..(312): Xaa can be any naturally occurring amino acid
  MISC_FEATURE (313)..(313): Xaa can be any naturally occurring amino acid
  MISC_FEATURE (314)..(314): Xaa can be any naturally occurring amino acid
  MISC_FEATURE (316)..(316): Xaa can be any naturally occurring amino acid except Pro or Gly
  MISC_FEATURE (318)..(318): Xaa can be any naturally occurring amino acid
  MISC_FEATURE (319)..(319): Xaa can be any naturally occurring amino acid
  MISC_FEATURE (320)..(320): Xaa can be any naturally occurring amino acid
  MISC_FEATURE (322)..(322): Xaa can be any naturally occurring amino acid except Pro or Gly
  MISC_FEATURE (324)..(324): Xaa can be any naturally occurring amino acid
  MISC_FEATURE (325)..(325): Xaa can be any naturally occurring amino acid
  MISC_FEATURE (326)..(326): Xaa can be any naturally occurring amino acid
  MISC_FEATURE (328)..(328): Xaa can be any naturally occurring amino acid except Pro or Gly
  MISC_FEATURE (330)..(330): Xaa can be any naturally occurring amino acid
  MISC_FEATURE (331)..(331): Xaa can be any naturally occurring amino acid
  MISC_FEATURE (332)..(332): Xaa can be any naturally occurring amino acid
  MISC_FEATURE (334)..(334): Xaa can be any naturally occurring amino acid except Pro or Gly
  MISC_FEATURE (336)..(336): Xaa can be any naturally occurring amino acid
  MISC_FEATURE (337)..(337): Xaa can be any naturally occurring amino acid
  MISC_FEATURE (338)..(338): Xaa can be any naturally occurring amino acid
  MISC_FEATURE (340)..(340): Xaa can be any naturally occurring amino acid except Pro or Gly
  MISC_FEATURE (342)..(342): Xaa can be any naturally occurring amino acid
  MISC_FEATURE (343)..(343): Xaa can be any naturally occurring amino acid
  MISC_FEATURE (344)..(344): Xaa can be any naturally occurring amino acid
  MISC_FEATURE (346)..(346): Xaa can be any naturally occurring amino acid except Pro or Gly
  MISC_FEATURE (348)..(348): Xaa can be any naturally occurring amino acid
  MISC_FEATURE (349)..(349): Xaa can be any naturally occurring amino acid
  MISC_FEATURE (350)..(350): Xaa can be any naturally occurring amino acid
  MISC_FEATURE (352)..(352): Xaa can be any naturally occurring amino acid except Pro or Gly
  MISC_FEATURE (354)..(354): Xaa can be any naturally occurring amino acid
  MISC_FEATURE (355)..(355): Xaa can be any naturally occurring amino acid
  MISC_FEATURE (356)..(356): Xaa can be any naturally occurring amino acid
  MISC_FEATURE (358)..(358): Xaa can be any naturally occurring amino acid except Pro or Gly
  MISC_FEATURE (360)..(360): Xaa can be any naturally occurring amino acid
  MISC_FEATURE (361)..(361): Xaa can be any naturally occurring amino acid
  MISC_FEATURE (362)..(362): Xaa can be any naturally occurring amino acid
  MISC_FEATURE (364)..(364): Xaa can be any naturally occurring amino acid except Pro or Gly
  MISC_FEATURE (366)..(366): Xaa can be any naturally occurring amino acid
  MISC_FEATURE (367)..(367): Xaa can be any naturally occurring amino acid
  MISC_FEATURE (368)..(368): Xaa can be any naturally occurring amino acid
  MISC_FEATURE (370)..(370): Xaa can be any naturally occurring amino acid except Pro or Gly
  MISC_FEATURE (372)..(372): Xaa can be any naturally occurring amino acid
  MISC_FEATURE (373)..(373): Xaa can be any naturally occurring amino acid
  MISC_FEATURE (374)..(374): Xaa can be any naturally occurring amino acid
  MISC_FEATURE (376)..(376): Xaa can be any naturally occurring amino acid except Pro or Gly
  MISC_FEATURE (378)..(378): Xaa can be any naturally occurring amino acid
  MISC_FEATURE (379)..(379): Xaa can be any naturally occurring amino acid
  MISC_FEATURE (380)..(380): Xaa can be any naturally occurring amino acid
  MISC_FEATURE (382)..(382): Xaa can be any naturally occurring amino acid except Pro or Gly
  MISC_FEATURE (384)..(384): Xaa can be any naturally occurring amino acid
  MISC_FEATURE (385)..(385): Xaa can be any naturally occurring amino acid
  MISC_FEATURE (386)..(386): Xaa can be any naturally occurring amino acid
  MISC_FEATURE (388)..(388): Xaa can be any naturally occurring amino acid except Pro or Gly
  MISC_FEATURE (390)..(390): Xaa can be any naturally occurring amino acid
  MISC_FEATURE (391)..(391): Xaa can be any naturally occurring amino acid
  MISC_FEATURE (392)..(392): Xaa can be any naturally occurring amino acid
  MISC_FEATURE (394)..(394): Xaa can be any naturally occurring amino acid except Pro or Gly
  MISC_FEATURE (396)..(396): Xaa can be any naturally occurring amino acid
  MISC_FEATURE (397)..(397): Xaa can be any naturally occurring amino acid
  MISC_FEATURE (398)..(398): Xaa can be any naturally occurring amino acid
  MISC_FEATURE (400)..(400): Xaa can be any naturally occurring amino acid except Pro or Gly
  MISC_FEATURE (402)..(402): Xaa can be any naturally occurring amino acid
  MISC_FEATURE (403)..(403): Xaa can be any naturally occurring amino acid
  MISC_FEATURE (404)..(404): Xaa can be any naturally occurring amino acid
  MISC_FEATURE (406)..(406): Xaa can be any naturally occurring amino acid except Pro or Gly
  MISC_FEATURE (408)..(408): Xaa can be any naturally occurring amino acid
  MISC_FEATURE (409)..(409): Xaa can be any naturally occurring amino acid
  MISC_FEATURE (410)..(410): Xaa can be any naturally occurring amino acid
  MISC_FEATURE (412)..(412): Xaa can be any naturally occurring amino acid except Pro or Gly
  MISC_FEATURE (414)..(414): Xaa can be any naturally occurring amino acid
  MISC_FEATURE (415)..(415): Xaa can be any naturally occurring amino acid
  MISC_FEATURE (416)..(416): Xaa can be any naturally occurring amino acid
  MISC_FEATURE (418)..(418): Xaa can be any naturally occurring amino acid except Pro or Gly
  MISC_FEATURE (420)..(420): Xaa can be any naturally occurring amino acid
  MISC_FEATURE (421)..(421): Xaa can be any naturally occurring amino acid
  MISC_FEATURE (422)..(422): Xaa can be any naturally occurring amino acid
  MISC_FEATURE (424)..(424): Xaa can be any naturally occurring amino acid except Pro or Gly
  MISC_FEATURE (426)..(426): Xaa can be any naturally occurring amino acid
  MISC_FEATURE (427)..(427): Xaa can be any naturally occurring amino acid
  MISC_FEATURE (428)..(428): Xaa can be any naturally occurring amino acid
  MISC_FEATURE (430)..(430): Xaa can be any naturally occurring amino acid except Pro or Gly
  MISC_FEATURE (432)..(432): Xaa can be any naturally occurring amino acid
  MISC_FEATURE (433)..(433): Xaa can be any naturally occurring amino acid
  MISC_FEATURE (434)..(434): Xaa can be any naturally occurring amino acid
  MISC_FEATURE (436)..(436): Xaa can be any naturally occurring amino acid except Pro or Gly
  MISC_FEATURE (438)..(438): Xaa can be any naturally occurring amino acid
  MISC_FEATURE (439)..(439): Xaa can be any naturally occurring amino acid
  MISC_FEATURE (440)..(440): Xaa can be any naturally occurring amino acid
  MISC_FEATURE (442)..(442): Xaa can be any naturally occurring amino acid except Pro or Gly
  MISC_FEATURE (444)..(444): Xaa can be any naturally occurring amino acid
  MISC_FEATURE (445)..(445): Xaa can be any naturally occurring amino acid
  MISC_FEATURE (446)..(446): Xaa can be any naturally occurring amino acid
  MISC_FEATURE (448)..(448): Xaa can be any naturally occurring amino acid except Pro or Gly
  MISC_FEATURE (450)..(450): Xaa can be any naturally occurring amino acid
  MISC_FEATURE (451)..(451): Xaa can be any naturally occurring amino acid
  MISC_FEATURE (452)..(452): Xaa can be any naturally occurring amino acid
  MISC_FEATURE (454)..(454): Xaa can be any naturally occurring amino acid except Pro or Gly
  MISC_FEATURE (456)..(456): Xaa can be any naturally occurring amino acid
  MISC_FEATURE (457)..(457): Xaa can be any naturally occurring amino acid
  MISC_FEATURE (458)..(458): Xaa can be any naturally occurring amino acid
  MISC_FEATURE (460)..(460): Xaa can be any naturally occurring amino acid except Pro or Gly
  MISC_FEATURE (462)..(462): Xaa can be any naturally occurring amino acid
  MISC_FEATURE (463)..(463): Xaa can be any naturally occurring amino acid
  MISC_FEATURE (464)..(464): Xaa can be any naturally occurring amino acid
  MISC_FEATURE (466)..(466): Xaa can be any naturally occurring amino acid except Pro or Gly
  MISC_FEATURE (468)..(468): Xaa can be any naturally occurring amino acid
  MISC_FEATURE (469)..(469): Xaa can be any naturally occurring amino acid
  MISC_FEATURE (470)..(470): Xaa can be any naturally occurring amino acid
  MISC_FEATURE (472)..(472): Xaa can be any naturally occurring amino acid except Pro or Gly
  MISC_FEATURE (474)..(474): Xaa can be any naturally occurring amino acid
  MISC_FEATURE (475)..(475): Xaa can be any naturally occurring amino acid
  MISC_FEATURE (476)..(476): Xaa can be any naturally occurring amino acid
  MISC_FEATURE (478)..(478): Xaa can be any naturally occurring amino acid except Pro or Gly
  MISC_FEATURE (480)..(480): Xaa can be any naturally occurring amino acid
  MISC_FEATURE (481)..(481): Xaa can be any naturally occurring amino acid
  MISC_FEATURE (482)..(482): Xaa can be any naturally occurring amino acid
  MISC_FEATURE (484)..(484): Xaa can be any naturally occurring amino acid except Pro or Gly
  MISC_FEATURE (486)..(486): Xaa can be any naturally occurring amino acid
  MISC_FEATURE (487)..(487): Xaa can be any naturally occurring amino acid
  MISC_FEATURE (488)..(488): Xaa can be any naturally occurring amino acid
  MISC_FEATURE (490)..(490): Xaa can be any naturally occurring amino acid except Pro or Gly
  MISC_FEATURE (492)..(492): Xaa can be any naturally occurring amino acid
  MISC_FEATURE (493)..(493): Xaa can be any naturally occurring amino acid
  MISC_FEATURE (494)..(494): Xaa can be any naturally occurring amino acid
  MISC_FEATURE (496)..(496): Xaa can be any naturally occurring amino acid except Pro or Gly
  MISC_FEATURE (498)..(498): Xaa can be any naturally occurring amino acid
  MISC_FEATURE (499)..(499): Xaa can be any naturally occurring amino acid
  MISC_FEATURE (500)..(500): Xaa can be any naturally occurring amino acid
  MISC_FEATURE (502)..(502): Xaa can be any naturally occurring amino acid except Pro or Gly
  MISC_FEATURE (504)..(504): Xaa can be any naturally occurring amino acid
  MISC_FEATURE (505)..(505): Xaa can be any naturally occurring amino acid
  MISC_FEATURE (506)..(506): Xaa can be any naturally occurring amino acid
  MISC_FEATURE (508)..(508): Xaa can be any naturally occurring amino acid except Pro or Gly
  MISC_FEATURE (510)..(510): Xaa can be any naturally occurring amino acid
  MISC_FEATURE (511)..(511): Xaa can be any naturally occurring amino acid
  MISC_FEATURE (512)..(512): Xaa can be any naturally occurring amino acid
  MISC_FEATURE (514)..(514): Xaa can be any naturally occurring amino acid except Pro or Gly
  MISC_FEATURE (516)..(516): Xaa can be any naturally occurring amino acid
  MISC_FEATURE (517)..(517): Xaa can be any naturally occurring amino acid
  MISC_FEATURE (518)..(518): Xaa can be any naturally occurring amino acid
  MISC_FEATURE (520)..(520): Xaa can be any naturally occurring amino acid except Pro or Gly
  MISC_FEATURE (522)..(522): Xaa can be any naturally occurring amino acid
  MISC_FEATURE (523)..(523): Xaa can be any naturally occurring amino acid
  MISC_FEATURE (524)..(524): Xaa can be any naturally occurring amino acid
  MISC_FEATURE (526)..(526): Xaa can be any naturally occurring amino acid except Pro or Gly
  MISC_FEATURE (528)..(528): Xaa can be any naturally occurring amino acid
  MISC_FEATURE (529)..(529): Xaa can be any naturally occurring amino acid
  MISC_FEATURE (530)..(530): Xaa can be any naturally occurring amino acid
  MISC_FEATURE (532)..(532): Xaa can be any naturally occurring amino acid except Pro or Gly
  MISC_FEATURE (534)..(534): Xaa can be any naturally occurring amino acid
  MISC_FEATURE (535)..(535): Xaa can be any naturally occurring amino acid
  MISC_FEATURE (536)..(536): Xaa can be any naturally occurring amino acid
  MISC_FEATURE (538)..(538): Xaa can be any naturally occurring amino acid except Pro or Gly
  MISC_FEATURE (540)..(540): Xaa can be any naturally occurring amino acid
  MISC_FEATURE (541)..(541): Xaa can be any naturally occurring amino acid
  MISC_FEATURE (542)..(542): Xaa can be any naturally occurring amino acid
  MISC_FEATURE (544)..(544): Xaa can be any naturally occurring amino acid except Pro or Gly
  MISC_FEATURE (546)..(546): Xaa can be any naturally occurring amino acid
  MISC_FEATURE (547)..(547): Xaa can be any naturally occurring amino acid
  MISC_FEATURE (548)..(548): Xaa can be any naturally occurring amino acid
  MISC_FEATURE (550)..(550): Xaa can be any naturally occurring amino acid except Pro or Gly
  MISC_FEATURE (552)..(552): Xaa can be any naturally occurring amino acid
  MISC_FEATURE (553)..(553): Xaa can be any naturally occurring amino acid
  MISC_FEATURE (554)..(554): Xaa can be any naturally occurring amino acid
  MISC_FEATURE (556)..(556): Xaa can be any naturally occurring amino acid except Pro or Gly
  MISC_FEATURE (558)..(558): Xaa can be any naturally occurring amino acid
  MISC_FEATURE (559)..(559): Xaa can be any naturally occurring amino acid
  MISC_FEATURE (560)..(560): Xaa can be any naturally occurring amino acid
  MISC_FEATURE (562)..(562): Xaa can be any naturally occurring amino acid except Pro or Gly
  MISC_FEATURE (564)..(564): Xaa can be any naturally occurring amino acid
  MISC_FEATURE (565)..(565): Xaa can be any naturally occurring amino acid
  MISC_FEATURE (566)..(566): Xaa can be any naturally occurring amino acid
  MISC_FEATURE (568)..(568): Xaa can be any naturally occurring amino acid except Pro or Gly
  MISC_FEATURE (570)..(570): Xaa can be any naturally occurring amino acid
  MISC_FEATURE (571)..(571): Xaa can be any naturally occurring amino acid
  MISC_FEATURE (572)..(572): Xaa can be any naturally occurring amino acid
  MISC_FEATURE (574)..(574): Xaa can be any naturally occurring amino acid except Pro or Gly
  MISC_FEATURE (576)..(576): Xaa can be any naturally occurring amino acid
  MISC_FEATURE (577)..(577): Xaa can be any naturally occurring amino acid
  MISC_FEATURE (578)..(578): Xaa can be any naturally occurring amino acid
  MISC_FEATURE (580)..(580): Xaa can be any naturally occurring amino acid except Pro or Gly
  MISC_FEATURE (582)..(582): Xaa can be any naturally occurring amino acid
  MISC_FEATURE (583)..(583): Xaa can be any naturally occurring amino acid
  MISC_FEATURE (584)..(584): Xaa can be any naturally occurring amino acid
  MISC_FEATURE (586)..(586): Xaa can be any naturally occurring amino acid except Pro or Gly
  MISC_FEATURE (588)..(588): Xaa can be any naturally occurring amino acid
  MISC_FEATURE (589)..(589): Xaa can be any naturally occurring amino acid
  MISC_FEATURE (590)..(590): Xaa can be any naturally occurring amino acid
  MISC_FEATURE (592)..(592): Xaa can be any naturally occurring amino acid except Pro or Gly
  MISC_FEATURE (594)..(594): Xaa can be any naturally occurring amino acid
  MISC_FEATURE (595)..(595): Xaa can be any naturally occurring amino acid
  MISC_FEATURE (596)..(596): Xaa can be any naturally occurring amino acid
  MISC_FEATURE (598)..(598): Xaa can be any naturally occurring amino acid except Pro or Gly
  MISC_FEATURE (600)..(600): Xaa can be any naturally occurring amino acid
  MISC_FEATURE (601)..(601): Xaa can be any naturally occurring amino acid
  MISC_FEATURE (602)..(602): Xaa can be any naturally occurring amino acid
  MISC_FEATURE (604)..(604): Xaa can be any naturally occurring amino acid except Pro or Gly
  MISC_FEATURE (606)..(606): Xaa can be any naturally occurring amino acid
  MISC_FEATURE (607)..(607): Xaa can be any naturally occurring amino acid
  MISC_FEATURE (608)..(608): Xaa can be any naturally occurring amino acid
  MISC_FEATURE (610)..(610): Xaa can be any naturally occurring amino acid except Pro or Gly
  MISC_FEATURE (612)..(612): Xaa can be any naturally occurring amino acid
  MISC_FEATURE (613)..(613): Xaa can be any naturally occurring amino acid
  MISC_FEATURE (614)..(614): Xaa can be any naturally occurring amino acid
  MISC_FEATURE (616)..(616): Xaa can be any naturally occurring amino acid except Pro or Gly
  MISC_FEATURE (618)..(618): Xaa can be any naturally occurring amino acid
  MISC_FEATURE (619)..(619): Xaa can be any naturally occurring amino acid
  MISC_FEATURE (620)..(620): Xaa can be any naturally occurring amino acid
  MISC_FEATURE (622)..(622): Xaa can be any naturally occurring amino acid except Pro or Gly
  MISC_FEATURE (624)..(624): Xaa can be any naturally occurring amino acid
  MISC_FEATURE (625)..(625): Xaa can be any naturally occurring amino acid
  MISC_FEATURE (626)..(626): Xaa can be any naturally occurring amino acid
  MISC_FEATURE (628)..(628): Xaa can be any naturally occurring amino acid except Pro or Gly
  MISC_FEATURE (630)..(630): Xaa can be any naturally occurring amino acid
  MISC_FEATURE (631)..(631): Xaa can be any naturally occurring amino acid
  MISC_FEATURE (632)..(632): Xaa can be any naturally occurring amino acid
  MISC_FEATURE (634)..(634): Xaa can be any naturally occurring amino acid except Pro or Gly
  MISC_FEATURE (636)..(636): Xaa can be any naturally occurring amino acid
  MISC_FEATURE (637)..(637): Xaa can be any naturally occurring amino acid
  MISC_FEATURE (638)..(638): Xaa can be any naturally occurring amino acid
  MISC_FEATURE (640)..(640): Xaa can be any naturally occurring amino acid except Pro or Gly
  MISC_FEATURE (642)..(642): Xaa can be any naturally occurring amino acid
  MISC_FEATURE (643)..(643): Xaa can be any naturally occurring amino acid
  MISC_FEATURE (644)..(644): Xaa can be any naturally occurring amino acid
  MISC_FEATURE (646)..(646): Xaa can be any naturally occurring amino acid except Pro or Gly
  MISC_FEATURE (648)..(648): Xaa can be any naturally occurring amino acid
  MISC_FEATURE (649)..(649): Xaa can be any naturally occurring amino acid
  MISC_FEATURE (650)..(650): Xaa can be any naturally occurring amino acid
  MISC_FEATURE (652)..(652): Xaa can be any naturally occurring amino acid except Pro or Gly
  MISC_FEATURE (654)..(654): Xaa can be any naturally occurring amino acid
  MISC_FEATURE (655)..(655): Xaa can be any naturally occurring amino acid
  MISC_FEATURE (656)..(656): Xaa can be any naturally occurring amino acid
  MISC_FEATURE (658)..(658): Xaa can be any naturally occurring amino acid except Pro or Gly
  MISC_FEATURE (660)..(660): Xaa can be any naturally occurring amino acid
  MISC_FEATURE (661)..(661): Xaa can be any naturally occurring amino acid
  MISC_FEATURE (662)..(662): Xaa can be any naturally occurring amino acid
  MISC_FEATURE (664)..(664): Xaa can be any naturally occurring amino acid except Pro or Gly
  MISC_FEATURE (666)..(666): Xaa can be any naturally occurring amino acid
  MISC_FEATURE (667)..(667): Xaa can be any naturally occurring amino acid
  MISC_FEATURE (668)..(668): Xaa can be any naturally occurring amino acid
  MISC_FEATURE (670)..(670): Xaa can be any naturally occurring amino acid except Pro or Gly
  MISC_FEATURE (672)..(672): Xaa can be any naturally occurring amino acid
  MISC_FEATURE (673)..(673): Xaa can be any naturally occurring amino acid
  MISC_FEATURE (674)..(674): Xaa can be any naturally occurring amino acid
  MISC_FEATURE (676)..(676): Xaa can be any naturally occurring amino acid except Pro or Gly
  MISC_FEATURE (678)..(678): Xaa can be any naturally occurring amino acid
  MISC_FEATURE (679)..(679): Xaa can be any naturally occurring amino acid
  MISC_FEATURE (680)..(680): Xaa can be any naturally occurring amino acid
  MISC_FEATURE (682)..(682): Xaa can be any naturally occurring amino acid except Pro or Gly
  MISC_FEATURE (684)..(684): Xaa can be any naturally occurring amino acid
  MISC_FEATURE (685)..(685): Xaa can be any naturally occurring amino acid
  MISC_FEATURE (686)..(686): Xaa can be any naturally occurring amino acid
  MISC_FEATURE (688)..(688): Xaa can be any naturally occurring amino acid except Pro or Gly
  MISC_FEATURE (690)..(690): Xaa can be any naturally occurring amino acid
  MISC_FEATURE (691)..(691): Xaa can be any naturally occurring amino acid
  MISC_FEATURE (692)..(692): Xaa can be any naturally occurring amino acid
  MISC_FEATURE (694)..(694): Xaa can be any naturally occurring amino acid except Pro or Gly
  MISC_FEATURE (696)..(696): Xaa can be any naturally occurring amino acid
  MISC_FEATURE (697)..(697): Xaa can be any naturally occurring amino acid
  MISC_FEATURE (698)..(698): Xaa can be any naturally occurring amino acid
  MISC_FEATURE (700)..(700): Xaa can be any naturally occurring amino acid except Pro or Gly
  MISC_FEATURE (702)..(702): Xaa can be any naturally occurring amino acid
  MISC_FEATURE (703)..(703): Xaa can be any naturally occurring amino acid
  MISC_FEATURE (704)..(704): Xaa can be any naturally occurring amino acid
  MISC_FEATURE (706)..(706): Xaa can be any naturally occurring amino acid except Pro or Gly
  MISC_FEATURE (708)..(708): Xaa can be any naturally occurring amino acid
  MISC_FEATURE (709)..(709): Xaa can be any naturally occurring amino acid
  MISC_FEATURE (710)..(710): Xaa can be any naturally occurring amino acid
  MISC_FEATURE (712)..(712): Xaa can be any naturally occurring amino acid except Pro or Gly
  MISC_FEATURE (714)..(714): Xaa can be any naturally occurring amino acid
  MISC_FEATURE (715)..(715): Xaa can be any naturally occurring amino acid
  MISC_FEATURE (716)..(716): Xaa can be any naturally occurring amino acid
  MISC_FEATURE (718)..(718): Xaa can be any naturally occurring amino acid except Pro or Gly
  MISC_FEATURE (720)..(720): Xaa can be any naturally occurring amino acid
  MISC_FEATURE (721)..(721): Xaa can be any naturally occurring amino acid
  MISC_FEATURE (722)..(722): Xaa can be any naturally occurring amino acid
  MISC_FEATURE (724)..(724): Xaa can be any naturally occurring amino acid except Pro or Gly
  MISC_FEATURE (726)..(726): Xaa can be any naturally occurring amino acid
  MISC_FEATURE (727)..(727): Xaa can be any naturally occurring amino acid
  MISC_FEATURE (728)..(728): Xaa can be any naturally occurring amino acid
  MISC_FEATURE (730)..(730): Xaa can be any naturally occurring amino acid except Pro or Gly
  MISC_FEATURE (732)..(732): Xaa can be any naturally occurring amino acid
  MISC_FEATURE (733)..(733): Xaa can be any naturally occurring amino acid
  MISC_FEATURE (734)..(734): Xaa can be any naturally occurring amino acid
  MISC_FEATURE (736)..(736): Xaa can be any naturally occurring amino acid except Pro or Gly
  MISC_FEATURE (738)..(738): Xaa can be any naturally occurring amino acid
  MISC_FEATURE (739)..(739): Xaa can be any naturally occurring amino acid
  MISC_FEATURE (740)..(740): Xaa can be any naturally occurring amino acid
  MISC_FEATURE (742)..(742): Xaa can be any naturally occurring amino acid except Pro or Gly
  MISC_FEATURE (744)..(744): Xaa can be any naturally occurring amino acid
  MISC_FEATURE (745)..(745): Xaa can be any naturally occurring amino acid
  MISC_FEATURE (746)..(746): Xaa can be any naturally occurring amino acid
  MISC_FEATURE (748)..(748): Xaa can be any naturally occurring amino acid except Pro or Gly
  MISC_FEATURE (750)..(750): Xaa can be any naturally occurring amino acid
  MISC_FEATURE (751)..(751): Xaa can be any naturally occurring amino acid
  MISC_FEATURE (752)..(752): Xaa can be any naturally occurring amino acid
  MISC_FEATURE (754)..(754): Xaa can be any naturally occurring amino acid except Pro or Gly
  MISC_FEATURE (756)..(756): Xaa can be any naturally occurring amino acid
  MISC_FEATURE (757)..(757): Xaa can be any naturally occurring amino acid
  MISC_FEATURE (758)..(758): Xaa can be any naturally occurring amino acid
  MISC_FEATURE (760)..(760): Xaa can be any naturally occurring amino acid except Pro or Gly
  MISC_FEATURE (762)..(762): Xaa can be any naturally occurring amino acid
  MISC_FEATURE (763)..(763): Xaa can be any naturally occurring amino acid
  MISC_FEATURE (764)..(764): Xaa can be any naturally occurring amino acid
  MISC_FEATURE (766)..(766): Xaa can be any naturally occurring amino acid except Pro or Gly
  MISC_FEATURE (768)..(768): Xaa can be any naturally occurring amino acid
  MISC_FEATURE (769)..(769): Xaa can be any naturally occurring amino acid
  MISC_FEATURE (770)..(770): Xaa can be any naturally occurring amino acid
  MISC_FEATURE (772)..(772): Xaa can be any naturally occurring amino acid except Pro or Gly
  MISC_FEATURE (774)..(774): Xaa can be any naturally occurring amino acid
  MISC_FEATURE (775)..(775): Xaa can be any naturally occurring amino acid
  MISC_FEATURE (776)..(776): Xaa can be any naturally occurring amino acid
  MISC_FEATURE (778)..(778): Xaa can be any naturally occurring amino acid except Pro or Gly
  MISC_FEATURE (780)..(780): Xaa can be any naturally occurring amino acid
  MISC_FEATURE (781)..(781): Xaa can be any naturally occurring amino acid
  MISC_FEATURE (782)..(782): Xaa can be any naturally occurring amino acid
  MISC_FEATURE (784)..(784): Xaa can be any naturally occurring amino acid except Pro or Gly
  MISC_FEATURE (786)..(786): Xaa can be any naturally occurring amino acid
  MISC_FEATURE (787)..(787): Xaa can be any naturally occurring amino acid
  MISC_FEATURE (788)..(788): Xaa can be any naturally occurring amino acid
  MISC_FEATURE (790)..(790): Xaa can be any naturally occurring amino acid except Pro or Gly
  MISC_FEATURE (792)..(792): Xaa can be any naturally occurring amino acid
  MISC_FEATURE (793)..(793): Xaa can be any naturally occurring amino acid
  MISC_FEATURE (794)..(794): Xaa can be any naturally occurring amino acid
  MISC_FEATURE (796)..(796): Xaa can be any naturally occurring amino acid except Pro or Gly
  MISC_FEATURE (798)..(798): Xaa can be any naturally occurring amino acid
  MISC_FEATURE (799)..(799): Xaa can be any naturally occurring amino acid
  MISC_FEATURE (800)..(800): Xaa can be any naturally occurring amino acid
  MISC_FEATURE (802)..(802): Xaa can be any naturally occurring amino acid except Pro or Gly
  MISC_FEATURE (804)..(804): Xaa can be any naturally occurring amino acid
  MISC_FEATURE (805)..(805): Xaa can be any naturally occurring amino acid
  MISC_FEATURE (806)..(806): Xaa can be any naturally occurring amino acid
  MISC_FEATURE (808)..(808): Xaa can be any naturally occurring amino acid except Pro or Gly
  MISC_FEATURE (810)..(810): Xaa can be any naturally occurring amino acid
  MISC_FEATURE (811)..(811): Xaa can be any naturally occurring amino acid
  MISC_FEATURE (812)..(812): Xaa can be any naturally occurring amino acid
  MISC_FEATURE (814)..(814): Xaa can be any naturally occurring amino acid except Pro or Gly
  MISC_FEATURE (816)..(816): Xaa can be any naturally occurring amino acid
  MISC_FEATURE (817)..(817): Xaa can be any naturally occurring amino acid
  MISC_FEATURE (818)..(818): Xaa can be any naturally occurring amino acid
  MISC_FEATURE (820)..(820): Xaa can be any naturally occurring amino acid except Pro or Gly
  MISC_FEATURE (822)..(822): Xaa can be any naturally occurring amino acid
  MISC_FEATURE (823)..(823): Xaa can be any naturally occurring amino acid
  MISC_FEATURE (824)..(824): Xaa can be any naturally occurring amino acid
  MISC_FEATURE (826)..(826): Xaa can be any naturally occurring amino acid except Pro or Gly
  MISC_FEATURE (828)..(828): Xaa can be any naturally occurring amino acid
  MISC_FEATURE (829)..(829): Xaa can be any naturally occurring amino acid
  MISC_FEATURE (830)..(830): Xaa can be any naturally occurring amino acid
  MISC_FEATURE (832)..(832): Xaa can be any naturally occurring amino acid except Pro or Gly
  MISC_FEATURE (834)..(834): Xaa can be any naturally occurring amino acid
  MISC_FEATURE (835)..(835): Xaa can be any naturally occurring amino acid
  MISC_FEATURE (836)..(836): Xaa can be any naturally occurring amino acid
  MISC_FEATURE (838)..(838): Xaa can be any naturally occurring amino acid except Pro or Gly
  MISC_FEATURE (840)..(840): Xaa can be any naturally occurring amino acid
  MISC_FEATURE (841)..(841): Xaa can be any naturally occurring amino acid
  MISC_FEATURE (842)..(842): Xaa can be any naturally occurring amino acid
  MISC_FEATURE (844)..(844): Xaa can be any naturally occurring amino acid except Pro or Gly
  MISC_FEATURE (846)..(846): Xaa can be any naturally occurring amino acid
  MISC_FEATURE (847)..(847): Xaa can be any naturally occurring amino acid
  MISC_FEATURE (848)..(848): Xaa can be any naturally occurring amino acid
  MISC_FEATURE (850)..(850): Xaa can be any naturally occurring amino acid except Pro or Gly
  MISC_FEATURE (852)..(852): Xaa can be any naturally occurring amino acid
  MISC_FEATURE (853)..(853): Xaa can be any naturally occurring amino acid
  MISC_FEATURE (854)..(854): Xaa can be any naturally occurring amino acid
  MISC_FEATURE (856)..(856): Xaa can be any naturally occurring amino acid except Pro or Gly
  MISC_FEATURE (858)..(858): Xaa can be any naturally occurring amino acid
  MISC_FEATURE (859)..(859): Xaa can be any naturally occurring amino acid
  MISC_FEATURE (860)..(860): Xaa can be any naturally occurring amino acid
  MISC_FEATURE (862)..(862): Xaa can be any naturally occurring amino acid except Pro or Gly
  MISC_FEATURE (864)..(864): Xaa can be any naturally occurring amino acid
  MISC_FEATURE (865)..(865): Xaa can be any naturally occurring amino acid
  MISC_FEATURE (866)..(866): Xaa can be any naturally occurring amino acid
  MISC_FEATURE (868)..(868): Xaa can be any naturally occurring amino acid except Pro or Gly
  MISC_FEATURE (870)..(870): Xaa can be any naturally occurring amino acid
  MISC_FEATURE (871)..(871): Xaa can be any naturally occurring amino acid
  MISC_FEATURE (872)..(872): Xaa can be any naturally occurring amino acid
  MISC_FEATURE (874)..(874): Xaa can be any naturally occurring amino acid except Pro or Gly
  MISC_FEATURE (876)..(876): Xaa can be any naturally occurring amino acid
  MISC_FEATURE (877)..(877): Xaa can be any naturally occurring amino acid
  MISC_FEATURE (878)..(878): Xaa can be any naturally occurring amino acid
  MISC_FEATURE (880)..(880): Xaa can be any naturally occurring amino acid except Pro or Gly
  MISC_FEATURE (882)..(882): Xaa can be any naturally occurring amino acid
  MISC_FEATURE (883)..(883): Xaa can be any naturally occurring amino acid
  MISC_FEATURE (884)..(884): Xaa can be any naturally occurring amino acid
  MISC_FEATURE (886)..(886): Xaa can be any naturally occurring amino acid except Pro or Gly
  MISC_FEATURE (888)..(888): Xaa can be any naturally occurring amino acid
  MISC_FEATURE (889)..(889): Xaa can be any naturally occurring amino acid
  MISC_FEATURE (890)..(890): Xaa can be any naturally occurring amino acid
  MISC_FEATURE (892)..(892): Xaa can be any naturally occurring amino acid except Pro or Gly
  MISC_FEATURE (894)..(894): Xaa can be any naturally occurring amino acid
  MISC_FEATURE (895)..(895): Xaa can be any naturally occurring amino acid
  MISC_FEATURE (896)..(896): Xaa can be any naturally occurring amino acid
  MISC_FEATURE (898)..(898): Xaa can be any naturally occurring amino acid except Pro or Gly
  MISC_FEATURE (900)..(900): Xaa can be any naturally occurring amino acid
  MISC_FEATURE (901)..(901): Xaa can be any naturally occurring amino acid
  MISC_FEATURE (902)..(902): Xaa can be any naturally occurring amino acid
  MISC_FEATURE (904)..(904): Xaa can be any naturally occurring amino acid except Pro or Gly
  MISC_FEATURE (906)..(906): Xaa can be any naturally occurring amino acid
  MISC_FEATURE (907)..(907): Xaa can be any naturally occurring amino acid
  MISC_FEATURE (908)..(908): Xaa can be any naturally occurring amino acid
  MISC_FEATURE (910)..(910): Xaa can be any naturally occurring amino acid except Pro or Gly
  MISC_FEATURE (912)..(912): Xaa can be any naturally occurring amino acid
  MISC_FEATURE (913)..(913): Xaa can be any naturally occurring amino acid
  MISC_FEATURE (914)..(914): Xaa can be any naturally occurring amino acid
  MISC_FEATURE (916)..(916): Xaa can be any naturally occurring amino acid except Pro or Gly
  MISC_FEATURE (918)..(918): Xaa can be any naturally occurring amino acid
  MISC_FEATURE (919)..(919): Xaa can be any naturally occurring amino acid
  MISC_FEATURE (920)..(920): Xaa can be any naturally occurring amino acid
  MISC_FEATURE (922)..(922): Xaa can be any naturally occurring amino acid except Pro or Gly
  MISC_FEATURE (924)..(924): Xaa can be any naturally occurring amino acid
  MISC_FEATURE (925)..(925): Xaa can be any naturally occurring amino acid
  MISC_FEATURE (926)..(926): Xaa can be any naturally occurring amino acid
  MISC_FEATURE (928)..(928): Xaa can be any naturally occurring amino acid except Pro or Gly
  MISC_FEATURE (930)..(930): Xaa can be any naturally occurring amino acid
  MISC_FEATURE (931)..(931): Xaa can be any naturally occurring amino acid
  MISC_FEATURE (932)..(932): Xaa can be any naturally occurring amino acid
  MISC_FEATURE (934)..(934): Xaa can be any naturally occurring amino acid except Pro or Gly
  MISC_FEATURE (936)..(936): Xaa can be any naturally occurring amino acid
  MISC_FEATURE (937)..(937): Xaa can be any naturally occurring amino acid
  MISC_FEATURE (938)..(938): Xaa can be any naturally occurring amino acid
  MISC_FEATURE (940)..(940): Xaa can be any naturally occurring amino acid except Pro or Gly
  MISC_FEATURE (942)..(942): Xaa can be any naturally occurring amino acid
  MISC_FEATURE (943)..(943): Xaa can be any naturally occurring amino acid
  MISC_FEATURE (944)..(944): Xaa can be any naturally occurring amino acid
  MISC_FEATURE (946)..(946): Xaa can be any naturally occurring amino acid except Pro or Gly
  MISC_FEATURE (948)..(948): Xaa can be any naturally occurring amino acid
  MISC_FEATURE (949)..(949): Xaa can be any naturally occurring amino acid
  MISC_FEATURE (950)..(950): Xaa can be any naturally occurring amino acid
  MISC_FEATURE (952)..(952): Xaa can be any naturally occurring amino acid except Pro or Gly
  MISC_FEATURE (954)..(954): Xaa can be any naturally occurring amino acid
  MISC_FEATURE (955)..(955): Xaa can be any naturally occurring amino acid
  MISC_FEATURE (956)..(956): Xaa can be any naturally occurring amino acid
  MISC_FEATURE (958)..(958): Xaa can be any naturally occurring amino acid except Pro or Gly
  MISC_FEATURE (960)..(960): Xaa can be any naturally occurring amino acid
XXPXGXXXPXGXXXPXGXXXPXGXXXPXGXXXPXGXXXPXGXXXPXGXXXPXGXXXPXGXXXPXGXXXPXGXXXPXGXXXPXGXXXPXGXXXPXGXXXPXGXXXPXGXXXPXGXXXPXGXXXPXGXXXPXGXXXPXGXXXPXGXXXPXGXXXPXGXXXPXGXXXPXGXXXPXGXXXPXGXXXPXGXXXPXGXXXPXGXXXPXGXXXPXGXXXPXGXXXPXGXXXPXGXXXPXGXXXPXGXXXPXGXXXPXGXXXPXGXXXPXGXXXPXGXXXPXGXXXPXGXXXPXGXXXPXGXXXPXGXXXPXGXXXPXGXXXPXGXXXPXGXXXPXGXXXPXGXXXPXGXXXPXGXXXPXGXXXPXGXXXPXGXXXPXGXXXPXGXXXPXGXXXPXGXXXPXGXXXPXGXXXPXGXXXPXGXXXPXGXXXPXGXXXPXGXXXPXGXXXPXGXXXPXGXXXPXGXXXPXGXXXPXGXXXPXGXXXPXGXXXPXGXXXPXGXXXPXGXXXPXGXXXPXGXXXPXGXXXPXGXXXPXGXXXPXGXXXPXGXXXPXGXXXPXGXXXPXGXXXPXGXXXPXGXXXPXGXXXPXGXXXPXGXXXPXGXXXPXGXXXPXGXXXPXGXXXPXGXXXPXGXXXPXGXXXPXGXXXPXGXXXPXGXXXPXGXXXPXGXXXPXGXXXPXGXXXPXGXXXPXGXXXPXGXXXPXGXXXPXGXXXPXGXXXPXGXXXPXGXXXPXGXXXPXGXXXPXGXXXPXGXXXPXGXXXPXGXXXPXGXXXPXGXXXPXGXXXPXGXXXPXGXXXPXGXXXPXGXXXPXGXXXPXGXXXPXGXXXPXGXXXPXGXXXPXGXXXPXGXXXPXGXXXPXGXXXPXGXXXPXGXXXPXGXXXPXGXXXPXGXXXPXGXXXPXGXXXPXGXXXPXGXXXPXGXXXPXGXXXPXGXXXPXGXXXPXGXXXPXGXXXPXGXXXPXGXXXPXGX

SEQ ID NO: 150 - protein, 1120 aa, Artificial Sequence
  elastin-like polypeptide
  MISC_FEATURE (1)..(1): Xaa can be any naturally occurring amino acid
  MISC_FEATURE (2)..(2): Xaa can be any naturally occurring amino acid
  MISC_FEATURE (4)..(4): Xaa can be any naturally occurring amino acid except Pro or Gly
  MISC_FEATURE (5)..(5): Xaa can be any naturally occurring amino acid except Pro or Gly
  MISC_FEATURE (7)..(7): Xaa can be any naturally occurring amino acid
  MISC_FEATURE (8)..(8): Xaa can be any naturally occurring amino acid
  MISC_FEATURE (9)..(9): Xaa can be any naturally occurring amino acid
  MISC_FEATURE (11)..(11): Xaa can be any naturally occurring amino acid except Pro or Gly
  MISC_FEATURE (12)..(12): Xaa can be any naturally occurring amino acid except Pro or Gly
  MISC_FEATURE (14)..(14): Xaa can be any naturally occurring amino acid
  MISC_FEATURE (15)..(15): Xaa can be any naturally occurring amino acid
  MISC_FEATURE (16)..(16): Xaa can be any naturally occurring amino acid
  MISC_FEATURE (18)..(18): Xaa can be any naturally occurring amino acid except Pro or Gly
  MISC_FEATURE (19)..(19): Xaa can be any naturally occurring amino acid except Pro or Gly
  MISC_FEATURE (21)..(21): Xaa can be any naturally occurring amino acid
  MISC_FEATURE (22)..(22): Xaa can be any naturally occurring amino acid
  MISC_FEATURE (23)..(23): Xaa can be any naturally occurring amino acid
  MISC_FEATURE (25)..(25): Xaa can be any naturally occurring amino acid except Pro or Gly
  MISC_FEATURE (26)..(26): Xaa can be any naturally occurring amino acid except Pro or Gly
  MISC_FEATURE (28)..(28): Xaa can be any naturally occurring amino acid
  MISC_FEATURE (29)..(29): Xaa can be any naturally occurring amino acid
  MISC_FEATURE (30)..(30): Xaa can be any naturally occurring amino acid
  MISC_FEATURE (32)..(32): Xaa can be any naturally occurring amino acid except Pro or Gly
  MISC_FEATURE (33)..(33): Xaa can be any naturally occurring amino acid except Pro or Gly
  MISC_FEATURE (35)..(35): Xaa can be any naturally occurring amino acid
  MISC_FEATURE (36)..(36): Xaa can be any naturally occurring amino acid
  MISC_FEATURE (37)..(37): Xaa can be any naturally occurring amino acid
  MISC_FEATURE (39)..(39): Xaa can be any naturally occurring amino acid except Pro or Gly
  MISC_FEATURE (40)..(40): Xaa can be any naturally occurring amino acid except Pro or Gly
  MISC_FEATURE (42)..(42): Xaa can be any naturally occurring amino acid
  MISC_FEATURE (43)..(43): Xaa can be any naturally occurring amino acid
  MISC_FEATURE (44)..(44): Xaa can be any naturally occurring amino acid
  MISC_FEATURE (46)..(46): Xaa can be any naturally occurring amino acid except Pro or Gly
  MISC_FEATURE (47)..(47): Xaa can be any naturally occurring amino acid except Pro or Gly
  MISC_FEATURE (49)..(49): Xaa can be any naturally occurring amino acid
  MISC_FEATURE (50)..(50): Xaa can be any naturally occurring amino acid
  MISC_FEATURE (51)..(51): Xaa can be any naturally occurring amino acid
  MISC_FEATURE (53)..(53): Xaa can be any naturally occurring amino acid except Pro or Gly
  MISC_FEATURE (54)..(54): Xaa can be any naturally occurring amino acid except Pro or Gly
  MISC_FEATURE (56)..(56): Xaa can be any naturally occurring amino acid
  MISC_FEATURE (57)..(57): Xaa can be any naturally occurring amino acid
  MISC_FEATURE (58)..(58): Xaa can be any naturally occurring amino acid
  MISC_FEATURE (60)..(60): Xaa can be any naturally occurring amino acid except Pro or Gly
  MISC_FEATURE (61)..(61): Xaa can be any naturally occurring amino acid except Pro or Gly
  MISC_FEATURE (63)..(63): Xaa can be any naturally occurring amino acid
  MISC_FEATURE (64)..(64): Xaa can be any naturally occurring amino acid
  MISC_FEATURE (65)..(65): Xaa can be any naturally occurring amino acid
  MISC_FEATURE (67)..(67): Xaa can be any naturally occurring amino acid except Pro or Gly
  MISC_FEATURE (68)..(68): Xaa can be any naturally occurring amino acid except Pro or Gly
  MISC_FEATURE (70)..(70): Xaa can be any naturally occurring amino acid
  MISC_FEATURE (71)..(1120): May be present or absent in groups of the repeat unit Xaa Xaa Pro Xaa Xaa Gly Xaa
  MISC_FEATURE (71)..(71): Xaa can be any naturally occurring amino acid
  MISC_FEATURE (72)..(72): Xaa can be any naturally occurring amino acid
  MISC_FEATURE (74)..(74): Xaa can be any naturally occurring amino acid except Pro or Gly
  MISC_FEATURE (75)..(75): Xaa can be any naturally occurring amino acid except Pro or Gly
  MISC_FEATURE (77)..(77): Xaa can be any naturally occurring amino acid
  MISC_FEATURE (78)..(78): Xaa can be any naturally occurring amino acid
  MISC_FEATURE (79)..(79): Xaa can be any naturally occurring amino acid
  MISC_FEATURE (81)..(81): Xaa can be any naturally occurring amino acid except Pro or Gly
  MISC_FEATURE (82)..(82): Xaa can be any naturally occurring amino acid except Pro or Gly
  MISC_FEATURE (84)..(84): Xaa can be any naturally occurring amino acid
  MISC_FEATURE (85)..(85): Xaa can be any naturally occurring amino acid
  MISC_FEATURE (86)..(86): Xaa can be any naturally occurring amino acid
  MISC_FEATURE (88)..(88): Xaa can be any naturally occurring amino acid except Pro or Gly
  MISC_FEATURE (89)..(89): Xaa can be any naturally occurring amino acid except Pro or Gly
  MISC_FEATURE (91)..(91): Xaa can be any naturally occurring amino acid
  MISC_FEATURE (92)..(92): Xaa can be any naturally occurring amino acid
  MISC_FEATURE (93)..(93): Xaa can be any naturally occurring amino acid
  MISC_FEATURE (95)..(95): Xaa can be any naturally occurring amino acid except Pro or Gly
  MISC_FEATURE (96)..(96): Xaa can be any naturally occurring amino acid except Pro or Gly
  MISC_FEATURE (98)..(98): Xaa can be any naturally occurring amino acid
  MISC_FEATURE (99)..(99): Xaa can be any naturally occurring amino acid
  MISC_FEATURE (100)..(100): Xaa can be any naturally occurring amino acid
  MISC_FEATURE (102)..(102): Xaa can be any naturally occurring amino acid except Pro or Gly
  MISC_FEATURE (103)..(103): Xaa can be any naturally occurring amino acid except Pro or Gly
  MISC_FEATURE (105)..(105): Xaa can be any naturally occurring amino acid
  MISC_FEATURE (106)..(106): Xaa can be any naturally occurring amino acid
  MISC_FEATURE (107)..(107): Xaa can be any naturally occurring amino acid
  MISC_FEATURE (109)..(109): Xaa can be any naturally occurring amino acid except Pro or Gly
  MISC_FEATURE (110)..(110): Xaa can be any naturally occurring amino acid except Pro or Gly
  MISC_FEATURE (112)..(112): Xaa can be any naturally occurring amino acid
  MISC_FEATURE (113)..(113): Xaa can be any naturally occurring amino acid
  MISC_FEATURE (114)..(114): Xaa can be any naturally occurring amino acid
  MISC_FEATURE (116)..(116): Xaa can be any naturally occurring amino acid except Pro or Gly
  MISC_FEATURE (117)..(117): Xaa can be any naturally occurring amino acid except Pro or Gly
  MISC_FEATURE (119)..(119): Xaa can be any naturally occurring amino acid
  MISC_FEATURE (120)..(120): Xaa can be any naturally occurring amino acid
  MISC_FEATURE (121)..(121): Xaa can be any naturally occurring amino acid
  MISC_FEATURE (123)..(123): Xaa can be any naturally occurring amino acid except Pro or Gly
  MISC_FEATURE (124)..(124): Xaa can be any naturally occurring amino acid except Pro or Gly
  MISC_FEATURE (126)..(126): Xaa can be any naturally occurring amino acid
  MISC_FEATURE (127)..(127): Xaa can be any naturally occurring amino acid
  MISC_FEATURE (128)..(128): Xaa can be any naturally occurring amino acid
  MISC_FEATURE (130)..(130): Xaa can be any naturally occurring amino acid except Pro or Gly
  MISC_FEATURE (131)..(131): Xaa can be any naturally occurring amino acid except Pro or Gly
  MISC_FEATURE (133)..(133): Xaa can be any naturally occurring amino acid
  MISC_FEATURE (134)..(134): Xaa can be any naturally occurring amino acid
  MISC_FEATURE (135)..(135): Xaa can be any naturally occurring amino acid
  MISC_FEATURE (137)..(137): Xaa can be any naturally occurring amino acid except Pro or Gly
  MISC_FEATURE (138)..(138): Xaa can be any naturally occurring amino acid except Pro or Gly
  MISC_FEATURE (140)..(140): Xaa can be any naturally occurring amino acid
  MISC_FEATURE (141)..(141): Xaa can be any naturally occurring amino acid
  MISC_FEATURE (142)..(142): Xaa can be any naturally occurring amino acid
  MISC_FEATURE (144)..(144): Xaa can be any naturally occurring amino acid except Pro or Gly
  MISC_FEATURE (145)..(145): Xaa can be any naturally occurring amino acid except Pro or Gly
  MISC_FEATURE (147)..(147): Xaa can be any naturally occurring amino acid
  MISC_FEATURE (148)..(148): Xaa can be any naturally occurring amino acid
  MISC_FEATURE (149)..(149): Xaa can be any naturally occurring amino acid
  MISC_FEATURE (151)..(151): Xaa can be any naturally occurring amino acid except Pro or Gly
  MISC_FEATURE (152)..(152): Xaa can be any naturally occurring amino acid except Pro or Gly
  MISC_FEATURE (154)..(154): Xaa can be any naturally occurring amino acid
  MISC_FEATURE (155)..(155): Xaa can be any naturally occurring amino acid
  MISC_FEATURE (156)..(156): Xaa can be any naturally occurring amino acid
  MISC_FEATURE (158)..(158): Xaa can be any naturally occurring amino acid except Pro or Gly
  MISC_FEATURE (159)..(159): Xaa can be any naturally occurring amino acid except Pro or Gly
  MISC_FEATURE (161)..(161): Xaa can be any naturally occurring amino acid
  MISC_FEATURE (162)..(162): Xaa can be any naturally occurring amino acid
  MISC_FEATURE (163)..(163): Xaa can be any naturally occurring amino acid
  MISC_FEATURE (165)..(165): Xaa can be any naturally occurring amino acid except Pro or Gly
  MISC_FEATURE (166)..(166): Xaa can be any naturally occurring amino acid except Pro or Gly
  MISC_FEATURE (168)..(168): Xaa can be any naturally occurring amino acid
  MISC_FEATURE (169)..(169): Xaa can be any naturally occurring amino acid
  MISC_FEATURE (170)..(170): Xaa can be any naturally occurring amino acid
  MISC_FEATURE (172)..(172): Xaa can be any naturally occurring amino acid except Pro or Gly
  MISC_FEATURE (173)..(173): Xaa can be any naturally occurring amino acid except Pro or Gly
  MISC_FEATURE (175)..(175): Xaa can be any naturally occurring amino acid
  MISC_FEATURE (176)..(176): Xaa can be any naturally occurring amino acid
  MISC_FEATURE (177)..(177): Xaa can be any naturally occurring amino acid
  MISC_FEATURE (179)..(179): Xaa can be any naturally occurring amino acid except Pro or Gly
  MISC_FEATURE (180)..(180): Xaa can be any naturally occurring amino acid except Pro or Gly
  MISC_FEATURE (182)..(182): Xaa can be any naturally occurring amino acid
  MISC_FEATURE (183)..(183): Xaa can be any naturally occurring amino acid
  MISC_FEATURE (184)..(184): Xaa can be any naturally occurring amino acid
  MISC_FEATURE (186)..(186): Xaa can be any naturally occurring amino acid except Pro or Gly
  MISC_FEATURE (187)..(187): Xaa can be any naturally occurring amino acid except Pro or Gly
  MISC_FEATURE (189)..(189): Xaa can be any naturally occurring amino acid
  MISC_FEATURE (190)..(190): Xaa can be any naturally occurring amino acid
  MISC_FEATURE (191)..(191): Xaa can be any naturally occurring amino acid
  MISC_FEATURE (193)..(193): Xaa can be any naturally occurring amino acid except Pro or Gly
  MISC_FEATURE (194)..(194): Xaa can be any naturally occurring amino acid except Pro or Gly
  MISC_FEATURE (196)..(196): Xaa can be any naturally occurring amino acid
  MISC_FEATURE (197)..(197): Xaa can be any naturally occurring amino acid
  MISC_FEATURE (198)..(198): Xaa can be any naturally occurring amino acid
  MISC_FEATURE (200)..(200): Xaa can be any naturally occurring amino acid except Pro or Gly
  MISC_FEATURE (201)..(201): Xaa can be any naturally occurring amino acid except Pro or Gly
  MISC_FEATURE (203)..(203): Xaa can be any naturally occurring amino acid
  MISC_FEATURE (204)..(204): Xaa can be any naturally occurring amino acid
  MISC_FEATURE (205)..(205): Xaa can be any naturally occurring amino acid
  MISC_FEATURE (207)..(207): Xaa can be any naturally occurring amino acid except Pro or Gly
  MISC_FEATURE (208)..(208): Xaa can be any naturally occurring amino acid except Pro or Gly
  MISC_FEATURE (210)..(210): Xaa can be any naturally occurring amino acid
  MISC_FEATURE (211)..(211): Xaa can be any naturally occurring amino acid
  MISC_FEATURE (212)..(212): Xaa can be any naturally occurring amino acid
  MISC_FEATURE (214)..(214): Xaa can be any naturally occurring amino acid except Pro or Gly
  MISC_FEATURE (215)..(215): Xaa can be any naturally occurring amino acid except Pro or Gly
  MISC_FEATURE (217)..(217): Xaa can be any naturally occurring amino acid
  MISC_FEATURE (218)..(218): Xaa can be any naturally occurring amino acid
  MISC_FEATURE (219)..(219): Xaa can be any naturally occurring amino acid
  MISC_FEATURE (221)..(221): Xaa can be any naturally occurring amino acid except Pro or Gly
  MISC_FEATURE (222)..(222): Xaa can be any naturally occurring amino acid except Pro or Gly
  MISC_FEATURE (224)..(224): Xaa can be any naturally occurring amino acid
  MISC_FEATURE (225)..(225): Xaa can be any naturally occurring amino acid
  MISC_FEATURE (226)..(226): Xaa can be any naturally occurring amino acid
  MISC_FEATURE (228)..(228): Xaa can be any naturally occurring amino acid except Pro or Gly
  MISC_FEATURE (229)..(229): Xaa can be any naturally occurring amino acid except Pro or Gly
  MISC_FEATURE (231)..(231): Xaa can be any naturally occurring amino acid
  MISC_FEATURE (232)..(232): Xaa can be any naturally occurring amino acid
  MISC_FEATURE (233)..(233): Xaa can be any naturally occurring amino acid
  MISC_FEATURE (235)..(235): Xaa can be any naturally occurring amino acid except Pro or Gly
  MISC_FEATURE (236)..(236): Xaa can be any naturally occurring amino acid except Pro or Gly
  MISC_FEATURE (238)..(238): Xaa can be any naturally occurring amino acid
  MISC_FEATURE (239)..(239): Xaa can be any naturally occurring amino acid
  MISC_FEATURE (240)..(240): Xaa can be any naturally occurring amino acid
  MISC_FEATURE (242)..(242): Xaa can be any naturally occurring amino acid except Pro or Gly
  MISC_FEATURE (243)..(243): Xaa can be any naturally occurring amino acid except Pro or Gly
  MISC_FEATURE (245)..(245): Xaa can be any naturally occurring amino acid
  MISC_FEATURE (246)..(246): Xaa can be any naturally occurring amino acid
  MISC_FEATURE (247)..(247): Xaa can be any naturally occurring amino acid
  MISC_FEATURE (249)..(249): Xaa can be any naturally occurring amino acid except Pro or Gly
  MISC_FEATURE (250)..(250): Xaa can be any naturally occurring amino acid except Pro or Gly
  MISC_FEATURE (252)..(252): Xaa can be any naturally occurring amino acid
  MISC_FEATURE (253)..(253): Xaa can be any naturally occurring amino acid
  MISC_FEATURE (254)..(254): Xaa can be any naturally occurring amino acid
  MISC_FEATURE (256)..(256): Xaa can be any naturally occurring amino acid except Pro or Gly
  MISC_FEATURE (257)..(257): Xaa can be any naturally occurring amino acid except Pro or Gly
  MISC_FEATURE (259)..(259): Xaa can be any naturally occurring amino acid
  MISC_FEATURE (260)..(260): Xaa can be any naturally occurring amino acid
  MISC_FEATURE (261)..(261): Xaa can be any naturally occurring amino acid
  MISC_FEATURE (263)..(263): Xaa can be any naturally occurring amino acid except Pro or Gly
  MISC_FEATURE (264)..(264): Xaa can be any naturally occurring amino acid except Pro or Gly
  MISC_FEATURE (266)..(266): Xaa can be any naturally occurring amino acid
  MISC_FEATURE (267)..(267): Xaa can be any naturally occurring amino acid
  MISC_FEATURE (268)..(268): Xaa can be any naturally occurring amino acid
  MISC_FEATURE (270)..(270): Xaa can be any naturally occurring amino acid except Pro or Gly
  MISC_FEATURE (271)..(271): Xaa can be any naturally occurring amino acid except Pro or Gly
  MISC_FEATURE (273)..(273): Xaa can be any naturally occurring amino acid
  MISC_FEATURE (274)..(274): Xaa can be any naturally occurring amino acid
  MISC_FEATURE (275)..(275): Xaa can be any naturally occurring amino acid
  MISC_FEATURE (277)..(277): Xaa can be any naturally occurring amino acid except Pro or Gly
  MISC_FEATURE (278)..(278): Xaa can be any naturally occurring amino acid except Pro or Gly
  MISC_FEATURE (280)..(280): Xaa can be any naturally occurring amino acid
  MISC_FEATURE (281)..(281): Xaa can be any naturally occurring amino acid
  MISC_FEATURE (282)..(282): Xaa can be any naturally occurring amino acid
  MISC_FEATURE (284)..(284): Xaa can be any naturally occurring amino acid except Pro or Gly
  MISC_FEATURE (285)..(285): Xaa can be any naturally occurring amino acid except Pro or Gly
  MISC_FEATURE (287)..(287): Xaa can be any naturally occurring amino acid
  MISC_FEATURE (288)..(288): Xaa can be any naturally occurring amino acid
  MISC_FEATURE (289)..(289): Xaa can be any naturally occurring amino acid
  MISC_FEATURE (291)..(291): Xaa can be any naturally occurring amino acid except Pro or Gly
  MISC_FEATURE (292)..(292): Xaa can be any naturally occurring amino acid except Pro or Gly
  MISC_FEATURE (294)..(294): Xaa can be any naturally occurring amino acid
  MISC_FEATURE (295)..(295): Xaa can be any naturally occurring amino acid
  MISC_FEATURE (296)..(296): Xaa can be any naturally occurring amino acid
  MISC_FEATURE (298)..(298): Xaa can be any naturally occurring amino acid except Pro or Gly
  MISC_FEATURE (299)..(299): Xaa can be any naturally occurring amino acid except Pro or Gly
  MISC_FEATURE (301)..(301): Xaa can be any naturally occurring amino acid
  MISC_FEATURE (302)..(302): Xaa can be any naturally occurring amino acid
  MISC_FEATURE (303)..(303): Xaa can be any naturally occurring amino acid
  MISC_FEATURE (305)..(305): Xaa can be any naturally occurring amino acid except Pro or Gly
  MISC_FEATURE (306)..(306): Xaa can be any naturally occurring amino acid except Pro or Gly
  MISC_FEATURE (308)..(308): Xaa can be any naturally occurring amino acid
  MISC_FEATURE (309)..(309): Xaa can be any naturally occurring amino acid
  MISC_FEATURE (310)..(310): Xaa can be any naturally occurring amino acid
  MISC_FEATURE (312)..(312): Xaa can be any naturally occurring amino acid except Pro or Gly
  MISC_FEATURE (313)..(313): Xaa can be any naturally occurring amino acid except Pro or Gly
  MISC_FEATURE (315)..(315): Xaa can be any naturally occurring amino acid
  MISC_FEATURE (316)..(316): Xaa can be any naturally occurring amino acid
  MISC_FEATURE (317)..(317): Xaa can be any naturally occurring amino acid
  MISC_FEATURE (319)..(319): Xaa can be any naturally occurring amino acid except Pro or Gly
  MISC_FEATURE (320)..(320): Xaa can be any naturally occurring amino acid except Pro or Gly
  MISC_FEATURE (322)..(322): Xaa can be any naturally occurring amino acid
  MISC_FEATURE (323)..(323): Xaa can be any naturally occurring amino acid
  MISC_FEATURE (324)..(324): Xaa can be any naturally occurring amino acid
  MISC_FEATURE (326)..(326): Xaa can be any naturally occurring amino acid except Pro or Gly
  MISC_FEATURE (327)..(327): Xaa can be any naturally occurring amino acid except Pro or Gly
  MISC_FEATURE (329)..(329): Xaa can be any naturally occurring amino acid
  MISC_FEATURE (330)..(330): Xaa can be any naturally occurring amino acid
  MISC_FEATURE (331)..(331): Xaa can be any naturally occurring amino acid
  MISC_FEATURE (333)..(333): Xaa can be any naturally occurring amino acid except Pro or Gly
  MISC_FEATURE (334)..(334): Xaa can be any naturally occurring amino acid except Pro or Gly
  MISC_FEATURE (336)..(336): Xaa can be any naturally occurring amino acid
  MISC_FEATURE (337)..(337): Xaa can be any naturally occurring amino acid
  MISC_FEATURE (338)..(338): Xaa can be any naturally occurring amino acid
  MISC_FEATURE (340)..(340): Xaa can be any naturally occurring amino acid except Pro or Gly
  MISC_FEATURE (341)..(341): Xaa can be any naturally occurring amino acid except Pro or Gly
  MISC_FEATURE (343)..(343): Xaa can be any naturally occurring amino acid
  MISC_FEATURE (344)..(344): Xaa can be any naturally occurring amino acid
  MISC_FEATURE (345)..(345): Xaa can be any naturally occurring amino acid
  MISC_FEATURE (347)..(347): Xaa can be any naturally occurring amino acid except Pro or Gly
  MISC_FEATURE (348)..(348): Xaa can be any naturally occurring amino acid except Pro or Gly
  MISC_FEATURE (350)..(350): Xaa can be any naturally occurring amino acid
  MISC_FEATURE (351)..(351): Xaa can be any naturally occurring amino acid
  MISC_FEATURE (352)..(352): Xaa can be any naturally occurring amino acid
  MISC_FEATURE (354)..(354): Xaa can be any naturally occurring amino acid except Pro or Gly
  MISC_FEATURE (355)..(355): Xaa can be any naturally occurring amino acid except Pro or Gly
  MISC_FEATURE (357)..(357): Xaa can be any naturally occurring amino acid
  MISC_FEATURE (358)..(358): Xaa can be any naturally occurring amino acid
  MISC_FEATURE (359)..(359): Xaa can be any naturally occurring amino acid
  MISC_FEATURE (361)..(361): Xaa can be any naturally occurring amino acid except Pro or Gly
  MISC_FEATURE (362)..(362): Xaa can be any naturally occurring amino acid except Pro or Gly
  MISC_FEATURE (364)..(364): Xaa can be any naturally occurring amino acid
  MISC_FEATURE (365)..(365): Xaa can be any naturally occurring amino acid
  MISC_FEATURE (366)..(366): Xaa can be any naturally occurring amino acid
  MISC_FEATURE (368)..(368): Xaa can be any naturally occurring amino acid except Pro or Gly
  MISC_FEATURE (369)..(369): Xaa can be any naturally occurring amino acid except Pro or Gly
  MISC_FEATURE (371)..(371): Xaa can be any naturally occurring amino acid
  MISC_FEATURE (372)..(372): Xaa can be any naturally occurring amino acid
  MISC_FEATURE (373)..(373): Xaa can be any naturally occurring amino acid
  MISC_FEATURE (375)..(375): Xaa can be any naturally occurring amino acid except Pro or Gly
  MISC_FEATURE (376)..(376): Xaa can be any naturally occurring amino acid except Pro or Gly
  MISC_FEATURE (378)..(378): Xaa can be any naturally occurring amino acid
  MISC_FEATURE (379)..(379): Xaa can be any naturally occurring amino acid
  MISC_FEATURE (380)..(380): Xaa can be any naturally occurring amino acid
  MISC_FEATURE (382)..(382): Xaa can be any naturally occurring amino acid except Pro or Gly
  MISC_FEATURE (383)..(383): Xaa can be any naturally occurring amino acid except Pro or Gly
  MISC_FEATURE (385)..(385): Xaa can be any naturally occurring amino acid
  MISC_FEATURE (386)..(386): Xaa can be any naturally occurring amino acid
  MISC_FEATURE (387)..(387): Xaa can be any naturally occurring amino acid
  MISC_FEATURE (389)..(389): Xaa can be any naturally occurring amino acid except Pro or Gly
  MISC_FEATURE (390)..(390): Xaa can be any naturally occurring amino acid except Pro or Gly
  MISC_FEATURE (392)..(392): Xaa can be any naturally occurring amino acid
  MISC_FEATURE (393)..(393): Xaa can be any naturally occurring amino acid
  MISC_FEATURE (394)..(394): Xaa can be any naturally occurring amino acid
  MISC_FEATURE (396)..(396): Xaa can be any naturally occurring amino acid except Pro or Gly
  MISC_FEATURE (397)..(397): Xaa can be any naturally occurring amino acid except Pro or Gly
  MISC_FEATURE (399)..(399): Xaa can be any naturally occurring amino acid
  MISC_FEATURE (400)..(400): Xaa can be any naturally occurring amino acid
  MISC_FEATURE (401)..(401): Xaa can be any naturally occurring amino acid
  MISC_FEATURE (403)..(403): Xaa can be any naturally occurring amino acid except Pro or Gly
  MISC_FEATURE (404)..(404): Xaa can be any naturally occurring amino acid except Pro or Gly
  MISC_FEATURE (406)..(406): Xaa can be any naturally occurring amino acid
  MISC_FEATURE (407)..(407): Xaa can be any naturally occurring amino acid
  MISC_FEATURE (408)..(408): Xaa can be any naturally occurring amino acid
  MISC_FEATURE (410)..(410): Xaa can be any naturally occurring amino acid except Pro or Gly
  MISC_FEATURE (411)..(411): Xaa can be any naturally occurring amino acid except Pro or Gly
  MISC_FEATURE (413)..(413): Xaa can be any naturally occurring amino acid
  MISC_FEATURE (414)..(414): Xaa can be any naturally occurring amino acid
  MISC_FEATURE (415)..(415): Xaa can be any naturally occurring amino acid
  MISC_FEATURE (417)..(417): Xaa can be any naturally occurring amino acid except Pro or Gly
  MISC_FEATURE (418)..(418): Xaa can be any naturally occurring amino acid except Pro or Gly
  MISC_FEATURE (420)..(420): Xaa can be any naturally occurring amino acid
  MISC_FEATURE (421)..(421): Xaa can be any naturally occurring amino acid
  MISC_FEATURE (422)..(422): Xaa can be any naturally occurring amino acid
  MISC_FEATURE (424)..(424): Xaa can be any naturally occurring amino acid except Pro or Gly
  MISC_FEATURE (425)..(425): Xaa can be any naturally occurring amino acid except Pro or Gly
  MISC_FEATURE (427)..(427): Xaa can be any naturally occurring amino acid
  MISC_FEATURE (428)..(428): Xaa can be any naturally occurring amino acid
  MISC_FEATURE (429)..(429): Xaa can be any naturally occurring amino acid
  MISC_FEATURE (431)..(431): Xaa can be any naturally occurring amino acid except Pro or Gly
  MISC_FEATURE (432)..(432): Xaa can be any naturally occurring amino acid except Pro or Gly
  MISC_FEATURE (434)..(434): Xaa can be any naturally occurring amino acid
  MISC_FEATURE (435)..(435): Xaa can be any naturally occurring amino acid
  MISC_FEATURE (436)..(436): Xaa can be any naturally occurring amino acid
  MISC_FEATURE (438)..(438): Xaa can be any naturally occurring amino acid except Pro or Gly
  MISC_FEATURE (439)..(439): Xaa can be any naturally occurring amino acid except Pro or Gly
  MISC_FEATURE (441)..(441): Xaa can be any naturally occurring amino acid
  MISC_FEATURE (442)..(442): Xaa can be any naturally occurring amino acid
  MISC_FEATURE (443)..(443): Xaa can be any naturally occurring amino acid
  MISC_FEATURE (445)..(445): Xaa can be any naturally occurring amino acid except Pro or Gly
  MISC_FEATURE (446)..(446): Xaa can be any naturally occurring amino acid except Pro or Gly
  MISC_FEATURE (448)..(448): Xaa can be any naturally occurring amino acid
  MISC_FEATURE (449)..(449): Xaa can be any naturally occurring amino acid
  MISC_FEATURE (450)..(450): Xaa can be any naturally occurring amino acid
  MISC_FEATURE (452)..(452): Xaa can be any naturally occurring amino acid except Pro or Gly
  MISC_FEATURE (453)..(453): Xaa can be any naturally occurring amino acid except Pro or Gly
  MISC_FEATURE (455)..(455): Xaa can be any naturally occurring amino acid
  MISC_FEATURE (456)..(456): Xaa can be any naturally occurring amino acid
  MISC_FEATURE (457)..(457): Xaa can be any naturally occurring amino acid
  MISC_FEATURE (459)..(459): Xaa can be any naturally occurring amino acid except Pro or Gly
  MISC_FEATURE (460)..(460): Xaa can be any naturally occurring amino acid except Pro or Gly
  MISC_FEATURE (462)..(462): Xaa can be any naturally occurring amino acid
  MISC_FEATURE (463)..(463): Xaa can be any naturally occurring amino acid
  MISC_FEATURE (464)..(464): Xaa can be any naturally occurring amino acid
  MISC_FEATURE (466)..(466): Xaa can be any naturally occurring amino acid except Pro or Gly
  MISC_FEATURE (467)..(467): Xaa can be any naturally occurring amino acid except Pro or Gly
  MISC_FEATURE (469)..(469): Xaa can be any naturally occurring amino acid
  MISC_FEATURE (470)..(470): Xaa can be any naturally occurring amino acid
  MISC_FEATURE (471)..(471): Xaa can be any naturally occurring amino acid
  MISC_FEATURE (473)..(473): Xaa can be any naturally occurring amino acid except Pro or Gly
  MISC_FEATURE (474)..(474): Xaa can be any naturally occurring amino acid except Pro or Gly
  MISC_FEATURE (476)..(476): Xaa can be any naturally occurring amino acid
  MISC_FEATURE (477)..(477): Xaa can be any naturally occurring amino acid
  MISC_FEATURE (478)..(478): Xaa can be any naturally occurring amino acid
  MISC_FEATURE (480)..(480): Xaa can be any naturally occurring amino acid except Pro or Gly
  MISC_FEATURE (481)..(481): Xaa can be any naturally occurring amino acid except Pro or Gly
  MISC_FEATURE (483)..(483): Xaa can be any naturally occurring amino acid
  MISC_FEATURE (484)..(484): Xaa can be any naturally occurring amino acid
  MISC_FEATURE (485)..(485): Xaa can be any naturally occurring amino acid
  MISC_FEATURE (487)..(487): Xaa can be any naturally occurring amino acid except Pro or Gly
  MISC_FEATURE (488)..(488): Xaa can be any naturally occurring amino acid except Pro or Gly
  MISC_FEATURE (490)..(490): Xaa can be any naturally occurring amino acid
  MISC_FEATURE (491)..(491): Xaa can be any naturally occurring amino acid
  MISC_FEATURE (492)..(492): Xaa can be any naturally occurring amino acid
  MISC_FEATURE (494)..(494): Xaa can be any naturally occurring amino acid except Pro or Gly
  MISC_FEATURE (495)..(495): Xaa can be any naturally occurring amino acid except Pro or Gly
  MISC_FEATURE (497)..(497): Xaa can be any naturally occurring amino acid
  MISC_FEATURE (498)..(498): Xaa can be any naturally occurring amino acid
  MISC_FEATURE (499)..(499): Xaa can be any naturally occurring amino acid
  MISC_FEATURE (501)..(501): Xaa can be any naturally occurring amino acid except Pro or Gly
  MISC_FEATURE (502)..(502): Xaa can be any naturally occurring amino acid except Pro or Gly
  MISC_FEATURE (504)..(504): Xaa can be any naturally occurring amino acid
  MISC_FEATURE (505)..(505): Xaa can be any naturally occurring amino acid
  MISC_FEATURE (506)..(506): Xaa can be any naturally occurring amino acid
  MISC_FEATURE (508)..(508): Xaa can be any naturally occurring amino acid except Pro or Gly
  MISC_FEATURE (509)..(509): Xaa can be any naturally occurring amino acid except Pro or Gly
  MISC_FEATURE (511)..(511): Xaa can be any naturally occurring amino acid
  MISC_FEATURE (512)..(512): Xaa can be any naturally occurring amino acid
  MISC_FEATURE (513)..(513): Xaa can be any naturally occurring amino acid
  MISC_FEATURE (515)..(515): Xaa can be any naturally occurring amino acid except Pro or Gly
  MISC_FEATURE (516)..(516): Xaa can be any naturally occurring amino acid except Pro or Gly
  MISC_FEATURE (518)..(518): Xaa can be any naturally occurring amino acid
  MISC_FEATURE (519)..(519): Xaa can be any naturally occurring amino acid
  MISC_FEATURE (520)..(520): Xaa can be any naturally occurring amino acid
  MISC_FEATURE (522)..(522): Xaa can be any naturally occurring amino acid except Pro or Gly
  MISC_FEATURE (523)..(523): Xaa can be any naturally occurring amino acid except Pro or Gly
  MISC_FEATURE (525)..(525): Xaa can be any naturally occurring amino acid
  MISC_FEATURE (526)..(526): Xaa can be any naturally occurring amino acid
  MISC_FEATURE (527)..(527): Xaa can be any naturally occurring amino acid
  MISC_FEATURE (529)..(529): Xaa can be any naturally occurring amino acid except Pro or Gly
  MISC_FEATURE (530)..(530): Xaa can be any naturally occurring amino acid except Pro or Gly
  MISC_FEATURE (532)..(532): Xaa can be any naturally occurring amino acid
  MISC_FEATURE (533)..(533): Xaa can be any naturally occurring amino acid
  MISC_FEATURE (534)..(534): Xaa can be any naturally occurring amino acid
  MISC_FEATURE (536)..(536): Xaa can be any naturally occurring amino acid except Pro or Gly
  MISC_FEATURE (537)..(537): Xaa can be any naturally occurring amino acid except Pro or Gly
  MISC_FEATURE (539)..(539): Xaa can be any naturally occurring amino acid
  MISC_FEATURE (540)..(540): Xaa can be any naturally occurring amino acid
  MISC_FEATURE (541)..(541): Xaa can be any naturally occurring amino acid
  MISC_FEATURE (543)..(543): Xaa can be any naturally occurring amino acid except Pro or Gly
  MISC_FEATURE (544)..(544): Xaa can be any naturally occurring amino acid except Pro or Gly
  MISC_FEATURE (546)..(546): Xaa can be any naturally occurring amino acid
  MISC_FEATURE (547)..(547): Xaa can be any naturally occurring amino acid
  MISC_FEATURE (548)..(548): Xaa can be any naturally occurring amino acid
  MISC_FEATURE (550)..(550): Xaa can be any naturally occurring amino acid except Pro or Gly
  MISC_FEATURE (551)..(551): Xaa can be any naturally occurring amino acid except Pro or Gly
  MISC_FEATURE (553)..(553): Xaa can be any naturally occurring amino acid
  MISC_FEATURE (554)..(554): Xaa can be any naturally occurring amino acid
  MISC_FEATURE (555)..(555): Xaa can be any naturally occurring amino acid
  MISC_FEATURE (557)..(557): Xaa can be any naturally occurring amino acid except Pro or Gly
  MISC_FEATURE (558)..(558): Xaa can be any naturally occurring amino acid except Pro or Gly
  MISC_FEATURE (560)..(560): Xaa can be any naturally occurring amino acid
  MISC_FEATURE (561)..(561): Xaa can be any naturally occurring amino acid
  MISC_FEATURE (562)..(562): Xaa can be any naturally occurring amino acid
  MISC_FEATURE (564)..(564): Xaa can be any naturally occurring amino acid except Pro or Gly
  MISC_FEATURE (565)..(565): Xaa can be any naturally occurring amino acid except Pro or Gly
  MISC_FEATURE (567)..(567): Xaa can be any naturally occurring amino acid
  MISC_FEATURE (568)..(568): Xaa can be any naturally occurring amino acid
  MISC_FEATURE (569)..(569): Xaa can be any naturally occurring amino acid
  MISC_FEATURE (571)..(571): Xaa can be any naturally occurring amino acid except Pro or Gly
  MISC_FEATURE (572)..(572): Xaa can be any naturally occurring amino acid except Pro or Gly
  MISC_FEATURE (574)..(574): Xaa can be any naturally occurring amino acid
  MISC_FEATURE (575)..(575): Xaa can be any naturally occurring amino acid
  MISC_FEATURE (576)..(576): Xaa can be any naturally occurring amino acid
  MISC_FEATURE (578)..(578): Xaa can be any naturally occurring amino acid except Pro or Gly
  MISC_FEATURE (579)..(579): Xaa can be any naturally occurring amino acid except Pro or Gly
  MISC_FEATURE (581)..(581): Xaa can be any naturally occurring amino acid
  MISC_FEATURE (582)..(582): Xaa can be any naturally occurring amino acid
  MISC_FEATURE (583)..(583): Xaa can be any naturally occurring amino acid
  MISC_FEATURE (585)..(585): Xaa can be any naturally occurring amino acid except Pro or Gly
  MISC_FEATURE (586)..(586): Xaa can be any naturally occurring amino acid except Pro or Gly
  MISC_FEATURE (588)..(588): Xaa can be any naturally occurring amino acid
  MISC_FEATURE (589)..(589): Xaa can be any naturally occurring amino acid
  MISC_FEATURE (590)..(590): Xaa can be any naturally occurring amino acid
  MISC_FEATURE (592)..(592): Xaa can be any naturally occurring amino acid except Pro or Gly
  MISC_FEATURE (593)..(593): Xaa can be any naturally occurring amino acid except Pro or Gly
  MISC_FEATURE (595)..(595): Xaa can be any naturally occurring amino acid
  MISC_FEATURE (596)..(596): Xaa can be any naturally occurring amino acid
  MISC_FEATURE (597)..(597): Xaa can be any naturally occurring amino acid
  MISC_FEATURE (599)..(599): Xaa can be any naturally occurring amino acid except Pro or Gly
  MISC_FEATURE (600)..(600): Xaa can be any naturally occurring amino acid except Pro or Gly
  MISC_FEATURE (602)..(602): Xaa can be any naturally occurring amino acid
  MISC_FEATURE (603)..(603): Xaa can be any naturally occurring amino acid
  MISC_FEATURE (604)..(604): Xaa can be any naturally occurring amino acid
  MISC_FEATURE (606)..(606): Xaa can be any naturally occurring amino acid except Pro or Gly
  MISC_FEATURE (607)..(607): Xaa can be any naturally occurring amino acid except Pro or Gly
  MISC_FEATURE (609)..(609): Xaa can be any naturally occurring amino acid
  MISC_FEATURE (610)..(610): Xaa can be any naturally occurring amino acid
  MISC_FEATURE (611)..(611): Xaa can be any naturally occurring amino acid
  MISC_FEATURE (613)..(613): Xaa can be any naturally occurring amino acid except Pro or Gly
  MISC_FEATURE (614)..(614): Xaa can be any naturally occurring amino acid except Pro or Gly
  MISC_FEATURE (616)..(616): Xaa can be any naturally occurring amino acid
  MISC_FEATURE (617)..(617): Xaa can be any naturally occurring amino acid
  MISC_FEATURE (618)..(618): Xaa can be any naturally occurring amino acid
  MISC_FEATURE (620)..(620): Xaa can be any naturally occurring amino acid except Pro or Gly
  MISC_FEATURE (621)..(621): Xaa can be any naturally occurring amino acid except Pro or Gly
  MISC_FEATURE (623)..(623): Xaa can be any naturally occurring amino acid
  MISC_FEATURE (624)..(624): Xaa can be any naturally occurring amino acid
  MISC_FEATURE (625)..(625): Xaa can be any naturally occurring amino acid
  MISC_FEATURE (627)..(627): Xaa can be any naturally occurring amino acid except Pro or Gly
  MISC_FEATURE (628)..(628): Xaa can be any naturally occurring amino acid except Pro or Gly
  MISC_FEATURE (630)..(630): Xaa can be any naturally occurring amino acid
  MISC_FEATURE (631)..(631): Xaa can be any naturally occurring amino acid
  MISC_FEATURE (632)..(632): Xaa can be any naturally occurring amino acid
  MISC_FEATURE (634)..(634): Xaa can be any naturally occurring amino acid except Pro or Gly
  MISC_FEATURE (635)..(635): Xaa can be any naturally occurring amino acid except Pro or Gly
  MISC_FEATURE (637)..(637): Xaa can be any naturally occurring amino acid
  MISC_FEATURE (638)..(638): Xaa can be any naturally occurring amino acid
  MISC_FEATURE (639)..(639): Xaa can be any naturally occurring amino acid
  MISC_FEATURE (641)..(641): Xaa can be any naturally occurring amino acid except Pro or Gly
  MISC_FEATURE (642)..(642): Xaa can be any naturally occurring amino acid except Pro or Gly
  MISC_FEATURE (644)..(644): Xaa can be any naturally occurring amino acid
  MISC_FEATURE (645)..(645): Xaa can be any naturally occurring amino acid
  MISC_FEATURE (646)..(646): Xaa can be any naturally occurring amino acid
  MISC_FEATURE (648)..(648): Xaa can be any naturally occurring amino acid except Pro or Gly
  MISC_FEATURE (649)..(649): Xaa can be any naturally occurring amino acid except Pro or Gly
  MISC_FEATURE (651)..(651): Xaa can be any naturally occurring amino acid
  MISC_FEATURE (652)..(652): Xaa can be any naturally occurring amino acid
  MISC_FEATURE (653)..(653): Xaa can be any naturally occurring amino acid
  MISC_FEATURE (655)..(655): Xaa can be any naturally occurring amino acid except Pro or Gly
  MISC_FEATURE (656)..(656): Xaa can be any naturally occurring amino acid except Pro or Gly
  MISC_FEATURE (658)..(658): Xaa can be any naturally occurring amino acid
  MISC_FEATURE (659)..(659): Xaa can be any naturally occurring amino acid
  MISC_FEATURE (660)..(660): Xaa can be any naturally occurring amino acid
  MISC_FEATURE (662)..(662): Xaa can be any naturally occurring amino acid except Pro or Gly
  MISC_FEATURE (663)..(663): Xaa can be any naturally occurring amino acid except Pro or Gly
  MISC_FEATURE (665)..(665): Xaa can be any naturally occurring amino acid
  MISC_FEATURE (666)..(666): Xaa can be any naturally occurring amino acid
  MISC_FEATURE (667)..(667): Xaa can be any naturally occurring amino acid
  MISC_FEATURE (669)..(669): Xaa can be any naturally occurring amino acid except Pro or Gly
  MISC_FEATURE (670)..(670): Xaa can be any naturally occurring amino acid except Pro or Gly
  MISC_FEATURE (672)..(672): Xaa can be any naturally occurring amino acid
  MISC_FEATURE (673)..(673): Xaa can be any naturally occurring amino acid
  MISC_FEATURE (674)..(674): Xaa can be any naturally occurring amino acid
  MISC_FEATURE (676)..(676): Xaa can be any naturally occurring amino acid except Pro or Gly
  MISC_FEATURE (677)..(677): Xaa can be any naturally occurring amino acid except Pro or Gly
  MISC_FEATURE (679)..(679): Xaa can be any naturally occurring amino acid
  MISC_FEATURE (680)..(680): Xaa can be any naturally occurring amino acid
  MISC_FEATURE (681)..(681): Xaa can be any naturally occurring amino acid
  MISC_FEATURE (683)..(683): Xaa can be any naturally occurring amino acid except Pro or Gly
  MISC_FEATURE (684)..(684): Xaa can be any naturally occurring amino acid except Pro or Gly
  MISC_FEATURE (686)..(686): Xaa can be any naturally occurring amino acid
  MISC_FEATURE (687)..(687): Xaa can be any naturally occurring amino acid
  MISC_FEATURE (688)..(688): Xaa can be any naturally occurring amino acid
  MISC_FEATURE (690)..(690): Xaa can be any naturally occurring amino acid except Pro or Gly
  MISC_FEATURE (691)..(691): Xaa can be any naturally occurring amino acid except Pro or Gly
  MISC_FEATURE (693)..(693): Xaa can be any naturally occurring amino acid
  MISC_FEATURE (694)..(694): Xaa can be any naturally occurring amino acid
  MISC_FEATURE (695)..(695): Xaa can be any naturally occurring amino acid
  MISC_FEATURE (697)..(697): Xaa can be any naturally occurring amino acid except Pro or Gly
  MISC_FEATURE (698)..(698): Xaa can be any naturally occurring amino acid except Pro or Gly
  MISC_FEATURE (700)..(700): Xaa can be any naturally occurring amino acid
  MISC_FEATURE (701)..(701): Xaa can be any naturally occurring amino acid
  MISC_FEATURE (702)..(702): Xaa can be any naturally occurring amino acid
  MISC_FEATURE (704)..(704): Xaa can be any naturally occurring amino acid except Pro or Gly
  MISC_FEATURE (705)..(705): Xaa can be any naturally occurring amino acid except Pro or Gly
  MISC_FEATURE (707)..(707): Xaa can be any naturally occurring amino acid
  MISC_FEATURE (708)..(708): Xaa can be any naturally occurring amino acid
  MISC_FEATURE (709)..(709): Xaa can be any naturally occurring amino acid
  MISC_FEATURE (711)..(711): Xaa can be any naturally occurring amino acid except Pro or Gly
  MISC_FEATURE (712)..(712): Xaa can be any naturally occurring amino acid except Pro or Gly
  MISC_FEATURE (714)..(714): Xaa can be any naturally occurring amino acid
  MISC_FEATURE (715)..(715): Xaa can be any naturally occurring amino acid
  MISC_FEATURE (716)..(716): Xaa can be any naturally occurring amino acid
  MISC_FEATURE (718)..(718): Xaa can be any naturally occurring amino acid except Pro or Gly
  MISC_FEATURE (719)..(719): Xaa can be any naturally occurring amino acid except Pro or Gly
  MISC_FEATURE (721)..(721): Xaa can be any naturally occurring amino acid
  MISC_FEATURE (722)..(722): Xaa can be any naturally occurring amino acid
  MISC_FEATURE (723)..(723): Xaa can be any naturally occurring amino acid
  MISC_FEATURE (725)..(725): Xaa can be any naturally occurring amino acid except Pro or Gly
  MISC_FEATURE (726)..(726): Xaa can be any naturally occurring amino acid except Pro or Gly
  MISC_FEATURE (728)..(728): Xaa can be any naturally occurring amino acid
  MISC_FEATURE (729)..(729): Xaa can be any naturally occurring amino acid
  MISC_FEATURE (730)..(730): Xaa can be any naturally occurring amino acid
  MISC_FEATURE (732)..(732): Xaa can be any naturally occurring amino acid except Pro or Gly
  MISC_FEATURE (733)..(733): Xaa can be any naturally occurring amino acid except Pro or Gly
  MISC_FEATURE (735)..(735): Xaa can be any naturally occurring amino acid
  MISC_FEATURE (736)..(736): Xaa can be any naturally occurring amino acid
  MISC_FEATURE (737)..(737): Xaa can be any naturally occurring amino acid
  MISC_FEATURE (739)..(739): Xaa can be any naturally occurring amino acid except Pro or Gly
  MISC_FEATURE (740)..(740): Xaa can be any naturally occurring amino acid except Pro or Gly
  MISC_FEATURE (742)..(742): Xaa can be any naturally occurring amino acid
  MISC_FEATURE (743)..(743): Xaa can be any naturally occurring amino acid
  MISC_FEATURE (744)..(744): Xaa can be any naturally occurring amino acid
  MISC_FEATURE (746)..(746): Xaa can be any naturally occurring amino acid except Pro or Gly
  MISC_FEATURE (747)..(747): Xaa can be any naturally occurring amino acid except Pro or Gly
  MISC_FEATURE (749)..(749): Xaa can be any naturally occurring amino acid
  MISC_FEATURE (750)..(750): Xaa can be any naturally occurring amino acid
  MISC_FEATURE (751)..(751): Xaa can be any naturally occurring amino acid
  MISC_FEATURE (753)..(753): Xaa can be any naturally occurring amino acid except Pro or Gly
  MISC_FEATURE (754)..(754): Xaa can be any naturally occurring amino acid except Pro or Gly
  MISC_FEATURE (756)..(756): Xaa can be any naturally occurring amino acid
  MISC_FEATURE (757)..(757): Xaa can be any naturally occurring amino acid
  MISC_FEATURE (758)..(758): Xaa can be any naturally occurring amino acid
  MISC_FEATURE (760)..(760): Xaa can be any naturally occurring amino acid except Pro or Gly
  MISC_FEATURE (761)..(761): Xaa can be any naturally occurring amino acid except Pro or Gly
  MISC_FEATURE (763)..(763): Xaa can be any naturally occurring amino acid
  MISC_FEATURE (764)..(764): Xaa can be any naturally occurring amino acid
  MISC_FEATURE (765)..(765): Xaa can be any naturally occurring amino acid
  MISC_FEATURE (767)..(767): Xaa can be any naturally occurring amino acid except Pro or Gly
  MISC_FEATURE (768)..(768): Xaa can be any naturally occurring amino acid except Pro or Gly
  MISC_FEATURE (770)..(770): Xaa can be any naturally occurring amino acid
  MISC_FEATURE (771)..(771): Xaa can be any naturally occurring amino acid
  MISC_FEATURE (772)..(772): Xaa can be any naturally occurring amino acid
  MISC_FEATURE (774)..(774): Xaa can be any naturally occurring amino acid except Pro or Gly
  MISC_FEATURE (775)..(775): Xaa can be any naturally occurring amino acid except Pro or Gly
  MISC_FEATURE (777)..(777): Xaa can be any naturally occurring amino acid
  MISC_FEATURE (778)..(778): Xaa can be any naturally occurring amino acid
  MISC_FEATURE (779)..(779): Xaa can be any naturally occurring amino acid
  MISC_FEATURE (781)..(781): Xaa can be any naturally occurring amino acid except Pro or Gly
  MISC_FEATURE (782)..(782): Xaa can be any naturally occurring amino acid except Pro or Gly
  MISC_FEATURE (784)..(784): Xaa can be any naturally occurring amino acid
  MISC_FEATURE (785)..(785): Xaa can be any naturally occurring amino acid
  MISC_FEATURE (786)..(786): Xaa can be any naturally occurring amino acid
  MISC_FEATURE (788)..(788): Xaa can be any naturally occurring amino acid except Pro or Gly
  MISC_FEATURE (789)..(789): Xaa can be any naturally occurring amino acid except Pro or Gly
  MISC_FEATURE (791)..(791): Xaa can be any naturally occurring amino acid
  MISC_FEATURE (792)..(792): Xaa can be any naturally occurring amino acid
  MISC_FEATURE (793)..(793): Xaa can be any naturally occurring amino acid
  MISC_FEATURE (795)..(795): Xaa can be any naturally occurring amino acid except Pro or Gly
  MISC_FEATURE (796)..(796): Xaa can be any naturally occurring amino acid except Pro or Gly
  MISC_FEATURE (798)..(798): Xaa can be any naturally occurring amino acid
  MISC_FEATURE (799)..(799): Xaa can be any naturally occurring amino acid
  MISC_FEATURE (800)..(800): Xaa can be any naturally occurring amino acid
  MISC_FEATURE (802)..(802): Xaa can be any naturally occurring amino acid except Pro or Gly
  MISC_FEATURE (803)..(803): Xaa can be any naturally occurring amino acid except Pro or Gly
  MISC_FEATURE (805)..(805): Xaa can be any naturally occurring amino acid
  MISC_FEATURE (806)..(806): Xaa can be any naturally occurring amino acid
  MISC_FEATURE (807)..(807): Xaa can be any naturally occurring amino acid
  MISC_FEATURE (809)..(809): Xaa can be any naturally occurring amino acid except Pro or Gly
  MISC_FEATURE (810)..(810): Xaa can be any naturally occurring amino acid except Pro or Gly
  MISC_FEATURE (812)..(812): Xaa can be any naturally occurring amino acid
  MISC_FEATURE (813)..(813): Xaa can be any naturally occurring amino acid
  MISC_FEATURE (814)..(814): Xaa can be any naturally occurring amino acid
  MISC_FEATURE (816)..(816): Xaa can be any naturally occurring amino acid except Pro or Gly
  MISC_FEATURE (817)..(817): Xaa can be any naturally occurring amino acid except Pro or Gly
  MISC_FEATURE (819)..(819): Xaa can be any naturally occurring amino acid
  MISC_FEATURE (820)..(820): Xaa can be any naturally occurring amino acid
  MISC_FEATURE (821)..(821): Xaa can be any naturally occurring amino acid
  MISC_FEATURE (823)..(823): Xaa can be any naturally occurring amino acid except Pro or Gly
  MISC_FEATURE (824)..(824): Xaa can be any naturally occurring amino acid except Pro or Gly
  MISC_FEATURE (826)..(826): Xaa can be any naturally occurring amino acid
  MISC_FEATURE (827)..(827): Xaa can be any naturally occurring amino acid
  MISC_FEATURE (828)..(828): Xaa can be any naturally occurring amino acid
  MISC_FEATURE (830)..(830): Xaa can be any naturally occurring amino acid except Pro or Gly
  MISC_FEATURE (831)..(831): Xaa can be any naturally occurring amino acid except Pro or Gly
  MISC_FEATURE (833)..(833): Xaa can be any naturally occurring amino acid
  MISC_FEATURE (834)..(834): Xaa can be any naturally occurring amino acid
  MISC_FEATURE (835)..(835): Xaa can be any naturally occurring amino acid
  MISC_FEATURE (837)..(837): Xaa can be any naturally occurring amino acid except Pro or Gly
  MISC_FEATURE (838)..(838): Xaa can be any naturally occurring amino acid except Pro or Gly
  MISC_FEATURE (840)..(840): Xaa can be any naturally occurring amino acid
  MISC_FEATURE (841)..(841): Xaa can be any naturally occurring amino acid
  MISC_FEATURE (842)..(842): Xaa can be any naturally occurring amino acid
  MISC_FEATURE (844)..(844): Xaa can be any naturally occurring amino acid except Pro or Gly
  MISC_FEATURE (845)..(845): Xaa can be any naturally occurring amino acid except Pro or Gly
  MISC_FEATURE (847)..(847): Xaa can be any naturally occurring amino acid
  MISC_FEATURE (848)..(848): Xaa can be any naturally occurring amino acid
  MISC_FEATURE (849)..(849): Xaa can be any naturally occurring amino acid
  MISC_FEATURE (851)..(851): Xaa can be any naturally occurring amino acid except Pro or Gly
  MISC_FEATURE (852)..(852): Xaa can be any naturally occurring amino acid except Pro or Gly
  MISC_FEATURE (854)..(854): Xaa can be any naturally occurring amino acid
  MISC_FEATURE (855)..(855): Xaa can be any naturally occurring amino acid
  MISC_FEATURE (856)..(856): Xaa can be any naturally occurring amino acid
  MISC_FEATURE (858)..(858): Xaa can be any naturally occurring amino acid except Pro or Gly
  MISC_FEATURE (859)..(859): Xaa can be any naturally occurring amino acid except Pro or Gly
  MISC_FEATURE (861)..(861): Xaa can be any naturally occurring amino acid
  MISC_FEATURE (862)..(862): Xaa can be any naturally occurring amino acid
  MISC_FEATURE (863)..(863): Xaa can be any naturally occurring amino acid
  MISC_FEATURE (865)..(865): Xaa can be any naturally occurring amino acid except Pro or Gly
  MISC_FEATURE (866)..(866): Xaa can be any naturally occurring amino acid except Pro or Gly
  MISC_FEATURE (868)..(868): Xaa can be any naturally occurring amino acid
  MISC_FEATURE (869)..(869): Xaa can be any naturally occurring amino acid
  MISC_FEATURE (870)..(870): Xaa can be any naturally occurring amino acid
  MISC_FEATURE (872)..(872): Xaa can be any naturally occurring amino acid except Pro or Gly
  MISC_FEATURE (873)..(873): Xaa can be any naturally occurring amino acid except Pro or Gly
  MISC_FEATURE (875)..(875): Xaa can be any naturally occurring amino acid
  MISC_FEATURE (876)..(876): Xaa can be any naturally occurring amino acid
  MISC_FEATURE (877)..(877): Xaa can be any naturally occurring amino acid
  MISC_FEATURE (879)..(879): Xaa can be any naturally occurring amino acid except Pro or Gly
  MISC_FEATURE (880)..(880): Xaa can be any naturally occurring amino acid except Pro or Gly
  MISC_FEATURE (882)..(882): Xaa can be any naturally occurring amino acid
  MISC_FEATURE (883)..(883): Xaa can be any naturally occurring amino acid
  MISC_FEATURE (884)..(884): Xaa can be any naturally occurring amino acid
  MISC_FEATURE (886)..(886): Xaa can be any naturally occurring amino acid except Pro or Gly
  MISC_FEATURE (887)..(887): Xaa can be any naturally occurring amino acid except Pro or Gly
  MISC_FEATURE (889)..(889): Xaa can be any naturally occurring amino acid
  MISC_FEATURE (890)..(890): Xaa can be any naturally occurring amino acid
  MISC_FEATURE (891)..(891): Xaa can be any naturally occurring amino acid
  MISC_FEATURE (893)..(893): Xaa can be any naturally occurring amino acid except Pro or Gly
  MISC_FEATURE (894)..(894): Xaa can be any naturally occurring amino acid except Pro or Gly
  MISC_FEATURE (896)..(896): Xaa can be any naturally occurring amino acid
  MISC_FEATURE (897)..(897): Xaa can be any naturally occurring amino acid
  MISC_FEATURE (898)..(898): Xaa can be any naturally occurring amino acid
  MISC_FEATURE (900)..(900): Xaa can be any naturally occurring amino acid except Pro or Gly
  MISC_FEATURE (901)..(901): Xaa can be any naturally occurring amino acid except Pro or Gly
  MISC_FEATURE (903)..(903): Xaa can be any naturally occurring amino acid
  MISC_FEATURE (904)..(904): Xaa can be any naturally occurring amino acid
  MISC_FEATURE (905)..(905): Xaa can be any naturally occurring amino acid
  MISC_FEATURE (907)..(907): Xaa can be any naturally occurring amino acid except Pro or Gly
  MISC_FEATURE (908)..(908): Xaa can be any naturally occurring amino acid except Pro or Gly
  MISC_FEATURE (910)..(910): Xaa can be any naturally occurring amino acid
  MISC_FEATURE (911)..(911): Xaa can be any naturally occurring amino acid
  MISC_FEATURE (912)..(912): Xaa can be any naturally occurring amino acid
  MISC_FEATURE (914)..(914): Xaa can be any naturally occurring amino acid except Pro or Gly
  MISC_FEATURE (915)..(915): Xaa can be any naturally occurring amino acid except Pro or Gly
  MISC_FEATURE (917)..(917): Xaa can be any naturally occurring amino acid
  MISC_FEATURE (918)..(918): Xaa can be any naturally occurring amino acid
  MISC_FEATURE (919)..(919): Xaa can be any naturally occurring amino acid
  MISC_FEATURE (921)..(921): Xaa can be any naturally occurring amino acid except Pro or Gly
  MISC_FEATURE (922)..(922): Xaa can be any naturally occurring amino acid except Pro or Gly
  MISC_FEATURE (924)..(924): Xaa can be any naturally occurring amino acid
  MISC_FEATURE (925)..(925): Xaa can be any naturally occurring amino acid
  MISC_FEATURE (926)..(926): Xaa can be any naturally occurring amino acid
  MISC_FEATURE (928)..(928): Xaa can be any naturally occurring amino acid except Pro or Gly
  MISC_FEATURE (929)..(929): Xaa can be any naturally occurring amino acid except Pro or Gly
  MISC_FEATURE (931)..(931): Xaa can be any naturally occurring amino acid
  MISC_FEATURE (932)..(932): Xaa can be any naturally occurring amino acid
  MISC_FEATURE (933)..(933): Xaa can be any naturally occurring amino acid
  MISC_FEATURE (935)..(935): Xaa can be any naturally occurring amino acid except Pro or Gly
  MISC_FEATURE (936)..(936): Xaa can be any naturally occurring amino acid except Pro or Gly
  MISC_FEATURE (938)..(938): Xaa can be any naturally occurring amino acid
  MISC_FEATURE (939)..(939): Xaa can be any naturally occurring amino acid
  MISC_FEATURE (940)..(940): Xaa can be any naturally occurring amino acid
  MISC_FEATURE (942)..(942): Xaa can be any naturally occurring amino acid except Pro or Gly
  MISC_FEATURE (943)..(943): Xaa can be any naturally occurring amino acid except Pro or Gly
  MISC_FEATURE (945)..(945): Xaa can be any naturally occurring amino acid
  MISC_FEATURE (946)..(946): Xaa can be any naturally occurring amino acid
  MISC_FEATURE (947)..(947): Xaa can be any naturally occurring amino acid
  MISC_FEATURE (949)..(949): Xaa can be any naturally occurring amino acid except Pro or Gly
  MISC_FEATURE (950)..(950): Xaa can be any naturally occurring amino acid except Pro or Gly
  MISC_FEATURE (952)..(952): Xaa can be any naturally occurring amino acid
  MISC_FEATURE (953)..(953): Xaa can be any naturally occurring amino acid
  MISC_FEATURE (954)..(954): Xaa can be any naturally occurring amino acid
  MISC_FEATURE (956)..(956): Xaa can be any naturally occurring amino acid except Pro or Gly
  MISC_FEATURE (957)..(957): Xaa can be any naturally occurring amino acid except Pro or Gly
  MISC_FEATURE (959)..(959): Xaa can be any naturally occurring amino acid
  MISC_FEATURE (960)..(960): Xaa can be any naturally occurring amino acid
  MISC_FEATURE (961)..(961): Xaa can be any naturally occurring amino acid
  MISC_FEATURE (963)..(963): Xaa can be any naturally occurring amino acid except Pro or Gly
  MISC_FEATURE (964)..(964): Xaa can be any naturally occurring amino acid except Pro or Gly
  MISC_FEATURE (966)..(966): Xaa can be any naturally occurring amino acid
  MISC_FEATURE (967)..(967): Xaa can be any naturally occurring amino acid
  MISC_FEATURE (968)..(968): Xaa can be any naturally occurring amino acid
  MISC_FEATURE (970)..(970): Xaa can be any naturally occurring amino acid except Pro or Gly
  MISC_FEATURE (971)..(971): Xaa can be any naturally occurring amino acid except Pro or Gly
  MISC_FEATURE (973)..(973): Xaa can be any naturally occurring amino acid
  MISC_FEATURE (974)..(974): Xaa can be any naturally occurring amino acid
  MISC_FEATURE (975)..(975): Xaa can be any naturally occurring amino acid
  MISC_FEATURE (977)..(977): Xaa can be any naturally occurring amino acid except Pro or Gly
  MISC_FEATURE (978)..(978): Xaa can be any naturally occurring amino acid except Pro or Gly
  MISC_FEATURE (980)..(980): Xaa can be any naturally occurring amino acid
  MISC_FEATURE (981)..(981): Xaa can be any naturally occurring amino acid
  MISC_FEATURE (982)..(982): Xaa can be any naturally occurring amino acid
  MISC_FEATURE (984)..(984): Xaa can be any naturally occurring amino acid except Pro or Gly
  MISC_FEATURE (985)..(985): Xaa can be any naturally occurring amino acid except Pro or Gly
  MISC_FEATURE (987)..(987): Xaa can be any naturally occurring amino acid
  MISC_FEATURE (988)..(988): Xaa can be any naturally occurring amino acid
  MISC_FEATURE (989)..(989): Xaa can be any naturally occurring amino acid
  MISC_FEATURE (991)..(991): Xaa can be any naturally occurring amino acid except Pro or Gly
  MISC_FEATURE (992)..(992): Xaa can be any naturally occurring amino acid except Pro or Gly
  MISC_FEATURE (994)..(994): Xaa can be any naturally occurring amino acid
  MISC_FEATURE (995)..(995): Xaa can be any naturally occurring amino acid
  MISC_FEATURE (996)..(996): Xaa can be any naturally occurring amino acid
  MISC_FEATURE (998)..(998): Xaa can be any naturally occurring amino acid except Pro or Gly
  MISC_FEATURE (999)..(999): Xaa can be any naturally occurring amino acid except Pro or Gly
  MISC_FEATURE (1001)..(1001): Xaa can be any naturally occurring amino acid
  MISC_FEATURE (1002)..(1002): Xaa can be any naturally occurring amino acid
  MISC_FEATURE (1003)..(1003): Xaa can be any naturally occurring amino acid
  MISC_FEATURE (1005)..(1005): Xaa can be any naturally occurring amino acid except Pro or Gly
  MISC_FEATURE (1006)..(1006): Xaa can be any naturally occurring amino acid except Pro or Gly
  MISC_FEATURE (1008)..(1008): Xaa can be any naturally occurring amino acid
  MISC_FEATURE (1009)..(1009): Xaa can be any naturally occurring amino acid
  MISC_FEATURE (1010)..(1010): Xaa can be any naturally occurring amino acid
  MISC_FEATURE (1012)..(1012): Xaa can be any naturally occurring amino acid except Pro or Gly
  MISC_FEATURE (1013)..(1013): Xaa can be any naturally occurring amino acid except Pro or Gly
  MISC_FEATURE (1015)..(1015): Xaa can be any naturally occurring amino acid
  MISC_FEATURE (1016)..(1016): Xaa can be any naturally occurring amino acid
  MISC_FEATURE (1017)..(1017): Xaa can be any naturally occurring amino acid
  MISC_FEATURE (1019)..(1019): Xaa can be any naturally occurring amino acid except Pro or Gly
  MISC_FEATURE (1020)..(1020): Xaa can be any naturally occurring amino acid except Pro or Gly
  MISC_FEATURE (1022)..(1022): Xaa can be any naturally occurring amino acid
  MISC_FEATURE (1023)..(1023): Xaa can be any naturally occurring amino acid
  MISC_FEATURE (1024)..(1024): Xaa can be any naturally occurring amino acid
  MISC_FEATURE (1026)..(1026): Xaa can be any naturally occurring amino acid except Pro or Gly
  MISC_FEATURE (1027)..(1027): Xaa can be any naturally occurring amino acid except Pro or Gly
  MISC_FEATURE (1029)..(1029): Xaa can be any naturally occurring amino acid
  MISC_FEATURE (1030)..(1030): Xaa can be any naturally occurring amino acid
  MISC_FEATURE (1031)..(1031): Xaa can be any naturally occurring amino acid
  MISC_FEATURE (1033)..(1033): Xaa can be any naturally occurring amino acid except Pro or Gly
  MISC_FEATURE (1034)..(1034): Xaa can be any naturally occurring amino acid except Pro or Gly
  MISC_FEATURE (1036)..(1036): Xaa can be any naturally occurring amino acid
  MISC_FEATURE (1037)..(1037): Xaa can be any naturally occurring amino acid
  MISC_FEATURE (1038)..(1038): Xaa can be any naturally occurring amino acid
  MISC_FEATURE (1040)..(1040): Xaa can be any naturally occurring amino acid except Pro or Gly
  MISC_FEATURE (1041)..(1041): Xaa can be any naturally occurring amino acid except Pro or Gly
  MISC_FEATURE (1043)..(1043): Xaa can be any naturally occurring amino acid
  MISC_FEATURE (1044)..(1044): Xaa can be any naturally occurring amino acid
  MISC_FEATURE (1045)..(1045): Xaa can be any naturally occurring amino acid
  MISC_FEATURE (1047)..(1047): Xaa can be any naturally occurring amino acid except Pro or Gly
  MISC_FEATURE (1048)..(1048): Xaa can be any naturally occurring amino acid except Pro or Gly
  MISC_FEATURE (1050)..(1050): Xaa can be any naturally occurring amino acid
  MISC_FEATURE (1051)..(1051): Xaa can be any naturally occurring amino acid
  MISC_FEATURE (1052)..(1052): Xaa can be any naturally occurring amino acid
  MISC_FEATURE (1054)..(1054): Xaa can be any naturally occurring amino acid except Pro or Gly
  MISC_FEATURE (1055)..(1055): Xaa can be any naturally occurring amino acid except Pro or Gly
  MISC_FEATURE (1057)..(1057): Xaa can be any naturally occurring amino acid
  MISC_FEATURE (1058)..(1058): Xaa can be any naturally occurring amino acid
  MISC_FEATURE (1059)..(1059): Xaa can be any naturally occurring amino acid
  MISC_FEATURE (1061)..(1061): Xaa can be any naturally occurring amino acid except Pro or Gly
  MISC_FEATURE (1062)..(1062): Xaa can be any naturally occurring amino acid except Pro or Gly
  MISC_FEATURE (1064)..(1064): Xaa can be any naturally occurring amino acid
  MISC_FEATURE (1065)..(1065): Xaa can be any naturally occurring amino acid
  MISC_FEATURE (1066)..(1066): Xaa can be any naturally occurring amino acid
  MISC_FEATURE (1068)..(1068): Xaa can be any naturally occurring amino acid except Pro or Gly
  MISC_FEATURE (1069)..(1069): Xaa can be any naturally occurring amino acid except Pro or Gly
  MISC_FEATURE (1071)..(1071): Xaa can be any naturally occurring amino acid
  MISC_FEATURE (1072)..(1072): Xaa can be any naturally occurring amino acid
  MISC_FEATURE (1073)..(1073): Xaa can be any naturally occurring amino acid
  MISC_FEATURE (1075)..(1075): Xaa can be any naturally occurring amino acid except Pro or Gly
  MISC_FEATURE (1076)..(1076): Xaa can be any naturally occurring amino acid except Pro or Gly
  MISC_FEATURE (1078)..(1078): Xaa can be any naturally occurring amino acid
  MISC_FEATURE (1079)..(1079): Xaa can be any naturally occurring amino acid
  MISC_FEATURE (1080)..(1080): Xaa can be any naturally occurring amino acid
  MISC_FEATURE (1082)..(1082): Xaa can be any naturally occurring amino acid except Pro or Gly
  MISC_FEATURE (1083)..(1083): Xaa can be any naturally occurring amino acid except Pro or Gly
  MISC_FEATURE (1085)..(1085): Xaa can be any naturally occurring amino acid
  MISC_FEATURE (1086)..(1086): Xaa can be any naturally occurring amino acid
  MISC_FEATURE (1087)..(1087): Xaa can be any naturally occurring amino acid
  MISC_FEATURE (1089)..(1089): Xaa can be any naturally occurring amino acid except Pro or Gly
  MISC_FEATURE (1090)..(1090): Xaa can be any naturally occurring amino acid except Pro or Gly
  MISC_FEATURE (1092)..(1092): Xaa can be any naturally occurring amino acid
  MISC_FEATURE (1093)..(1093): Xaa can be any naturally occurring amino acid
  MISC_FEATURE (1094)..(1094): Xaa can be any naturally occurring amino acid
  MISC_FEATURE (1096)..(1096): Xaa can be any naturally occurring amino acid except Pro or Gly
  MISC_FEATURE (1097)..(1097): Xaa can be any naturally occurring amino acid except Pro or Gly
  MISC_FEATURE (1099)..(1099): Xaa can be any naturally occurring amino acid
  MISC_FEATURE (1100)..(1100): Xaa can be any naturally occurring amino acid
  MISC_FEATURE (1101)..(1101): Xaa can be any naturally occurring amino acid
  MISC_FEATURE (1103)..(1103): Xaa can be any naturally occurring amino acid except Pro or Gly
  MISC_FEATURE (1104)..(1104): Xaa can be any naturally occurring amino acid except Pro or Gly
  MISC_FEATURE (1106)..(1106): Xaa can be any naturally occurring amino acid
  MISC_FEATURE (1107)..(1107): Xaa can be any naturally occurring amino acid
  MISC_FEATURE (1108)..(1108): Xaa can be any naturally occurring amino acid
  MISC_FEATURE (1110)..(1110): Xaa can be any naturally occurring amino acid except Pro or Gly
  MISC_FEATURE (1111)..(1111): Xaa can be any naturally occurring amino acid except Pro or Gly
  MISC_FEATURE (1113)..(1113): Xaa can be any naturally occurring amino acid
  MISC_FEATURE (1114)..(1114): Xaa can be any naturally occurring amino acid
  MISC_FEATURE (1115)..(1115): Xaa can be any naturally occurring amino acid
  MISC_FEATURE (1117)..(1117): Xaa can be any naturally occurring amino acid except Pro or Gly
  MISC_FEATURE (1118)..(1118): Xaa can be any naturally occurring amino acid except Pro or Gly
  MISC_FEATURE (1120)..(1120): Xaa can be any naturally occurring amino acid
XXPXXGXXXPXXGXXXPXXGXXXPXXGXXXPXXGXXXPXXGXXXPXXGXXXPXXGXXXPXXGXXXPXXGXXXPXXGXXXPXXGXXXPXXGXXXPXXGXXXPXXGXXXPXXGXXXPXXGXXXPXXGXXXPXXGXXXPXXGXXXPXXGXXXPXXGXXXPXXGXXXPXXGXXXPXXGXXXPXXGXXXPXXGXXXPXXGXXXPXXGXXXPXXGXXXPXXGXXXPXXGXXXPXXGXXXPXXGXXXPXXGXXXPXXGXXXPXXGXXXPXXGXXXPXXGXXXPXXGXXXPXXGXXXPXXGXXXPXXGXXXPXXGXXXPXXGXXXPXXGXXXPXXGXXXPXXGXXXPXXGXXXPXXGXXXPXXGXXXPXXGXXXPXXGXXXPXXGXXXPXXGXXXPXXGXXXPXXGXXXPXXGXXXPXXGXXXPXXGXXXPXXGXXXPXXGXXXPXXGXXXPXXGXXXPXXGXXXPXXGXXXPXXGXXXPXXGXXXPXXGXXXPXXGXXXPXXGXXXPXXGXXXPXXGXXXPXXGXXXPXXGXXXPXXGXXXPXXGXXXPXXGXXXPXXGXXXPXXGXXXPXXGXXXPXXGXXXPXXGXXXPXXGXXXPXXGXXXPXXGXXXPXXGXXXPXXGXXXPXXGXXXPXXGXXXPXXGXXXPXXGXXXPXXGXXXPXXGXXXPXXGXXXPXXGXXXPXXGXXXPXXGXXXPXXGXXXPXXGXXXPXXGXXXPXXGXXXPXXGXXXPXXGXXXPXXGXXXPXXGXXXPXXGXXXPXXGXXXPXXGXXXPXXGXXXPXXGXXXPXXGXXXPXXGXXXPXXGXXXPXXGXXXPXXGXXXPXXGXXXPXXGXXXPXXGXXXPXXGXXXPXXGXXXPXXGXXXPXXGXXXPXXGXXXPXXGXXXPXXGXXXPXXGXXXPXXGXXXPXXGXXXPXXGXXXPXXGXXXPXXGXXXPXXGXXXPXXGXXXPXXGXXXPXXGXXXPXXGXXXPXXGXXXPXXGXXXPXXGXXXPXXGXXXPXXGXXXPXXGXXXPXXGXXXPXXGXXXPXXGXXXPXXGXXXPXXGXXXPXXGXXXPXXGXXXPXXGXXXPXXGXXXPXXGXXXPXXGXXXPXXGXXXPXXGXXXPXXGXXXPXXGXXXPXXGXXXPXXGX

SEQ ID NO: 151 - protein, 1280 aa, Artificial Sequence
  elastin-like polypeptide
  MISC_FEATURE (1)..(1): Xaa can be any naturally occurring amino acid
  MISC_FEATURE (2)..(2): Xaa can be any naturally occurring amino acid
  MISC_FEATURE (4)..(4): Xaa can be any naturally occurring amino acid except Pro or Gly
  MISC_FEATURE (5)..(5): Xaa can be any naturally occurring amino acid except Pro or Gly
  MISC_FEATURE (6)..(6): Xaa can be any naturally occurring amino acid except Pro or Gly
  MISC_FEATURE (8)..(8): Xaa can be any naturally occurring amino acid
  MISC_FEATURE (9)..(9): Xaa can be any naturally occurring amino acid
  MISC_FEATURE (10)..(10): Xaa can be any naturally occurring amino acid
  MISC_FEATURE (12)..(12): Xaa can be any naturally occurring amino acid except Pro or Gly
  MISC_FEATURE (13)..(13): Xaa can be any naturally occurring amino acid except Pro or Gly
  MISC_FEATURE (14)..(14): Xaa can be any naturally occurring amino acid except Pro or Gly
  MISC_FEATURE (16)..(16): Xaa can be any naturally occurring amino acid
  MISC_FEATURE (17)..(17): Xaa can be any naturally occurring amino acid
  MISC_FEATURE (18)..(18): Xaa can be any naturally occurring amino acid
  MISC_FEATURE (20)..(20): Xaa can be any naturally occurring amino acid except Pro or Gly
  MISC_FEATURE (21)..(21): Xaa can be any naturally occurring amino acid except Pro or Gly
  MISC_FEATURE (22)..(22): Xaa can be any naturally occurring amino acid except Pro or Gly
  MISC_FEATURE (24)..(24): Xaa can be any naturally occurring amino acid
  MISC_FEATURE (25)..(25): Xaa can be any naturally occurring amino acid
  MISC_FEATURE (26)..(26): Xaa can be any naturally occurring amino acid
  MISC_FEATURE (28)..(28): Xaa can be any naturally occurring amino acid except Pro or Gly
  MISC_FEATURE (29)..(29): Xaa can be any naturally occurring amino acid except Pro or Gly
  MISC_FEATURE (30)..(30): Xaa can be any naturally occurring amino acid except Pro or Gly
  MISC_FEATURE (32)..(32): Xaa can be any naturally occurring amino acid
  MISC_FEATURE (33)..(33): Xaa can be any naturally occurring amino acid
  MISC_FEATURE (34)..(34): Xaa can be any naturally occurring amino acid
  MISC_FEATURE (36)..(36): Xaa can be any naturally occurring amino acid except Pro or Gly
  MISC_FEATURE (37)..(37): Xaa can be any naturally occurring amino acid except Pro or Gly
  MISC_FEATURE (38)..(38): Xaa can be any naturally occurring amino acid except Pro or Gly
  MISC_FEATURE (40)..(40): Xaa can be any naturally occurring amino acid
  MISC_FEATURE (41)..(41): Xaa can be any naturally occurring amino acid
  MISC_FEATURE (42)..(42): Xaa can be any naturally occurring amino acid
  MISC_FEATURE (44)..(44): Xaa can be any naturally occurring amino acid except Pro or Gly
  MISC_FEATURE (45)..(45): Xaa can be any naturally occurring amino acid except Pro or Gly
  MISC_FEATURE (46)..(46): Xaa can be any naturally occurring amino acid except Pro or Gly
  MISC_FEATURE (48)..(48): Xaa can be any naturally occurring amino acid
  MISC_FEATURE (49)..(49): Xaa can be any naturally occurring amino acid
  MISC_FEATURE (50)..(50): Xaa can be any naturally occurring amino acid
  MISC_FEATURE (52)..(52): Xaa can be any naturally occurring amino acid except Pro or Gly
  MISC_FEATURE (53)..(53): Xaa can be any naturally occurring amino acid except Pro or Gly
  MISC_FEATURE (54)..(54): Xaa can be any naturally occurring amino acid except Pro or Gly
  MISC_FEATURE (56)..(56): Xaa can be any naturally occurring amino acid
  MISC_FEATURE (57)..(57): Xaa can be any naturally occurring amino acid
  MISC_FEATURE (58)..(58): Xaa can be any naturally occurring amino acid
  MISC_FEATURE (60)..(60): Xaa can be any naturally occurring amino acid except Pro or Gly
  MISC_FEATURE (61)..(61): Xaa can be any naturally occurring amino acid except Pro or Gly
  MISC_FEATURE (62)..(62): Xaa can be any naturally occurring amino acid except Pro or Gly
  MISC_FEATURE (64)..(64): Xaa can be any naturally occurring amino acid
  MISC_FEATURE (65)..(65): Xaa can be any naturally occurring amino acid
  MISC_FEATURE (66)..(66): Xaa can be any naturally occurring amino acid
  MISC_FEATURE (68)..(68): Xaa can be any naturally occurring amino acid except Pro or Gly
  MISC_FEATURE (69)..(69): Xaa can be any naturally occurring amino acid except Pro or Gly
  MISC_FEATURE (70)..(70): Xaa can be any naturally occurring amino acid except Pro or Gly
  MISC_FEATURE (72)..(72): Xaa can be any naturally occurring amino acid
  MISC_FEATURE (73)..(73): Xaa can be any naturally occurring amino acid
  MISC_FEATURE (74)..(74): Xaa can be any naturally occurring amino acid
  MISC_FEATURE (76)..(76): Xaa can be any naturally occurring amino acid except Pro or Gly
  MISC_FEATURE (77)..(77): Xaa can be any naturally occurring amino acid except Pro or Gly
  MISC_FEATURE (78)..(78): Xaa can be any naturally occurring amino acid except Pro or Gly
  MISC_FEATURE (80)..(80): Xaa can be any naturally occurring amino acid
  MISC_FEATURE (81)..(1280): May be present or absent in groups of the repeat unit Xaa Xaa Pro Xaa Xaa Xaa Gly Xaa
  MISC_FEATURE (81)..(81): Xaa can be any naturally occurring amino acid
  MISC_FEATURE (82)..(82): Xaa can be any naturally occurring amino acid
  MISC_FEATURE (84)..(84): Xaa can be any naturally occurring amino acid except Pro or Gly
  MISC_FEATURE (85)..(85): Xaa can be any naturally occurring amino acid except Pro or Gly
  MISC_FEATURE (86)..(86): Xaa can be any naturally occurring amino acid except Pro or Gly
  MISC_FEATURE (88)..(88): Xaa can be any naturally occurring amino acid
  MISC_FEATURE (89)..(89): Xaa can be any naturally occurring amino acid
  MISC_FEATURE (90)..(90): Xaa can be any naturally occurring amino acid
  MISC_FEATURE (92)..(92): Xaa can be any naturally occurring amino acid except Pro or Gly
  MISC_FEATURE (93)..(93): Xaa can be any naturally occurring amino acid except Pro or Gly
  MISC_FEATURE (94)..(94): Xaa can be any naturally occurring amino acid except Pro or Gly
  MISC_FEATURE (96)..(96): Xaa can be any naturally occurring amino acid
  MISC_FEATURE (97)..(97): Xaa can be any naturally occurring amino acid
  MISC_FEATURE (98)..(98): Xaa can be any naturally occurring amino acid
  MISC_FEATURE (100)..(100): Xaa can be any naturally occurring amino acid except Pro or Gly
  MISC_FEATURE (101)..(101): Xaa can be any naturally occurring amino acid except Pro or Gly
  MISC_FEATURE (102)..(102): Xaa can be any naturally occurring amino acid except Pro or Gly
  MISC_FEATURE (104)..(104): Xaa can be any naturally occurring amino acid
  MISC_FEATURE (105)..(105): Xaa can be any naturally occurring amino acid
  MISC_FEATURE (106)..(106): Xaa can be any naturally occurring amino acid
  MISC_FEATURE (108)..(108): Xaa can be any naturally occurring amino acid except Pro or Gly
  MISC_FEATURE (109)..(109): Xaa can be any naturally occurring amino acid except Pro or Gly
  MISC_FEATURE (110)..(110): Xaa can be any naturally occurring amino acid except Pro or Gly
  MISC_FEATURE (112)..(112): Xaa can be any naturally occurring amino acid
  MISC_FEATURE (113)..(113): Xaa can be any naturally occurring amino acid
  MISC_FEATURE (114)..(114): Xaa can be any naturally occurring amino acid
  MISC_FEATURE (116)..(116): Xaa can be any naturally occurring amino acid except Pro or Gly
  MISC_FEATURE (117)..(117): Xaa can be any naturally occurring amino acid except Pro or Gly
  MISC_FEATURE (118)..(118): Xaa can be any naturally occurring amino acid except Pro or Gly
  MISC_FEATURE (120)..(120): Xaa can be any naturally occurring amino acid
  MISC_FEATURE (121)..(121): Xaa can be any naturally occurring amino acid
  MISC_FEATURE (122)..(122): Xaa can be any naturally occurring amino acid
  MISC_FEATURE (124)..(124): Xaa can be any naturally occurring amino acid except Pro or Gly
  MISC_FEATURE (125)..(125): Xaa can be any naturally occurring amino acid except Pro or Gly
  MISC_FEATURE (126)..(126): Xaa can be any naturally occurring amino acid except Pro or Gly
  MISC_FEATURE (128)..(128): Xaa can be any naturally occurring amino acid
  MISC_FEATURE (129)..(129): Xaa can be any naturally occurring amino acid
  MISC_FEATURE (130)..(130): Xaa can be any naturally occurring amino acid
  MISC_FEATURE (132)..(132): Xaa can be any naturally occurring amino acid except Pro or Gly
  MISC_FEATURE (133)..(133): Xaa can be any naturally occurring amino acid except Pro or Gly
  MISC_FEATURE (134)..(134): Xaa can be any naturally occurring amino acid except Pro or Gly
  MISC_FEATURE (136)..(136): Xaa can be any naturally occurring amino acid
  MISC_FEATURE (137)..(137): Xaa can be any naturally occurring amino acid
  MISC_FEATURE (138)..(138): Xaa can be any naturally occurring amino acid
  MISC_FEATURE (140)..(140): Xaa can be any naturally occurring amino acid except Pro or Gly
  MISC_FEATURE (141)..(141): Xaa can be any naturally occurring amino acid except Pro or Gly
  MISC_FEATURE (142)..(142): Xaa can be any naturally occurring amino acid except Pro or Gly
  MISC_FEATURE (144)..(144): Xaa can be any naturally occurring amino acid
  MISC_FEATURE (145)..(145): Xaa can be any naturally occurring amino acid
  MISC_FEATURE (146)..(146): Xaa can be any naturally occurring amino acid
  MISC_FEATURE (148)..(148): Xaa can be any naturally occurring amino acid except Pro or Gly
  MISC_FEATURE (149)..(149): Xaa can be any naturally occurring amino acid except Pro or Gly
  MISC_FEATURE (150)..(150): Xaa can be any naturally occurring amino acid except Pro or Gly
  MISC_FEATURE (152)..(152): Xaa can be any naturally occurring amino acid
  MISC_FEATURE (153)..(153): Xaa can be any naturally occurring amino acid
  MISC_FEATURE (154)..(154): Xaa can be any naturally occurring amino acid
  MISC_FEATURE (156)..(156): Xaa can be any naturally occurring amino acid except Pro or Gly
  MISC_FEATURE (157)..(157): Xaa can be any naturally occurring amino acid except Pro or Gly
  MISC_FEATURE (158)..(158): Xaa can be any naturally occurring amino acid except Pro or Gly
  MISC_FEATURE (160)..(160): Xaa can be any naturally occurring amino acid
  MISC_FEATURE (161)..(161): Xaa can be any naturally occurring amino acid
  MISC_FEATURE (162)..(162): Xaa can be any naturally occurring amino acid
  MISC_FEATURE (164)..(164): Xaa can be any naturally occurring amino acid except Pro or Gly
  MISC_FEATURE (165)..(165): Xaa can be any naturally occurring amino acid except Pro or Gly
  MISC_FEATURE (166)..(166): Xaa can be any naturally occurring amino acid except Pro or Gly
  MISC_FEATURE (168)..(168): Xaa can be any naturally occurring amino acid
  MISC_FEATURE (169)..(169): Xaa can be any naturally occurring amino acid
  MISC_FEATURE (170)..(170): Xaa can be any naturally occurring amino acid
  MISC_FEATURE (172)..(172): Xaa can be any naturally occurring amino acid except Pro or Gly
  MISC_FEATURE (173)..(173): Xaa can be any naturally occurring amino acid except Pro or Gly
  MISC_FEATURE (174)..(174): Xaa can be any naturally occurring amino acid except Pro or Gly
  MISC_FEATURE (176)..(176): Xaa can be any naturally occurring amino acid
  MISC_FEATURE (177)..(177): Xaa can be any naturally occurring amino acid
  MISC_FEATURE (178)..(178): Xaa can be any naturally occurring amino acid
  MISC_FEATURE (180)..(180): Xaa can be any naturally occurring amino acid except Pro or Gly
  MISC_FEATURE (181)..(181): Xaa can be any naturally occurring amino acid except Pro or Gly
  MISC_FEATURE (182)..(182): Xaa can be any naturally occurring amino acid except Pro or Gly
  MISC_FEATURE (184)..(184): Xaa can be any naturally occurring amino acid
  MISC_FEATURE (185)..(185): Xaa can be any naturally occurring amino acid
  MISC_FEATURE (186)..(186): Xaa can be any naturally occurring amino acid
  MISC_FEATURE (188)..(188): Xaa can be any naturally occurring amino acid except Pro or Gly
  MISC_FEATURE (189)..(189): Xaa can be any naturally occurring amino acid except Pro or Gly
  MISC_FEATURE (190)..(190): Xaa can be any naturally occurring amino acid except Pro or Gly
  MISC_FEATURE (192)..(192): Xaa can be any naturally occurring amino acid
  MISC_FEATURE (193)..(193): Xaa can be any naturally occurring amino acid
  MISC_FEATURE (194)..(194): Xaa can be any naturally occurring amino acid
  MISC_FEATURE (196)..(196): Xaa can be any naturally occurring amino acid except Pro or Gly
  MISC_FEATURE (197)..(197): Xaa can be any naturally occurring amino acid except Pro or Gly
  MISC_FEATURE (198)..(198): Xaa can be any naturally occurring amino acid except Pro or Gly
  MISC_FEATURE (200)..(200): Xaa can be any naturally occurring amino acid
  MISC_FEATURE (201)..(201): Xaa can be any naturally occurring amino acid
  MISC_FEATURE (202)..(202): Xaa can be any naturally occurring amino acid
  MISC_FEATURE (204)..(204): Xaa can be any naturally occurring amino acid except Pro or Gly
  MISC_FEATURE (205)..(205): Xaa can be any naturally occurring amino acid except Pro or Gly
  MISC_FEATURE (206)..(206): Xaa can be any naturally occurring amino acid except Pro or Gly
  MISC_FEATURE (208)..(208): Xaa can be any naturally occurring amino acid
  MISC_FEATURE (209)..(209): Xaa can be any naturally occurring amino acid
  MISC_FEATURE (210)..(210): Xaa can be any naturally occurring amino acid
  MISC_FEATURE (212)..(212): Xaa can be any naturally occurring amino acid except Pro or Gly
  MISC_FEATURE (213)..(213): Xaa can be any naturally occurring amino acid except Pro or Gly
  MISC_FEATURE (214)..(214): Xaa can be any naturally occurring amino acid except Pro or Gly
  MISC_FEATURE (216)..(216): Xaa can be any naturally occurring amino acid
  MISC_FEATURE (217)..(217): Xaa can be any naturally occurring amino acid
  MISC_FEATURE (218)..(218): Xaa can be any naturally occurring amino acid
  MISC_FEATURE (220)..(220): Xaa can be any naturally occurring amino acid except Pro or Gly
  MISC_FEATURE (221)..(221): Xaa can be any naturally occurring amino acid except Pro or Gly
  MISC_FEATURE (222)..(222): Xaa can be any naturally occurring amino acid except Pro or Gly
  MISC_FEATURE (224)..(224): Xaa can be any naturally occurring amino acid
  MISC_FEATURE (225)..(225): Xaa can be any naturally occurring amino acid
  MISC_FEATURE (226)..(226): Xaa can be any naturally occurring amino acid
  MISC_FEATURE (228)..(228): Xaa can be any naturally occurring amino acid except Pro or Gly
  MISC_FEATURE (229)..(229): Xaa can be any naturally occurring amino acid except Pro or Gly
  MISC_FEATURE (230)..(230): Xaa can be any naturally occurring amino acid except Pro or Gly
  MISC_FEATURE (232)..(232): Xaa can be any naturally occurring amino acid
  MISC_FEATURE (233)..(233): Xaa can be any naturally occurring amino acid
  MISC_FEATURE (234)..(234): Xaa can be any naturally occurring amino acid
  MISC_FEATURE (236)..(236): Xaa can be any naturally occurring amino acid except Pro or Gly
  MISC_FEATURE (237)..(237): Xaa can be any naturally occurring amino acid except Pro or Gly
  MISC_FEATURE (238)..(238): Xaa can be any naturally occurring amino acid except Pro or Gly
  MISC_FEATURE (240)..(240): Xaa can be any naturally occurring amino acid
  MISC_FEATURE (241)..(241): Xaa can be any naturally occurring amino acid
  MISC_FEATURE (242)..(242): Xaa can be any naturally occurring amino acid
  MISC_FEATURE (244)..(244): Xaa can be any naturally occurring amino acid except Pro or Gly
  MISC_FEATURE (245)..(245): Xaa can be any naturally occurring amino acid except Pro or Gly
  MISC_FEATURE (246)..(246): Xaa can be any naturally occurring amino acid except Pro or Gly
  MISC_FEATURE (248)..(248): Xaa can be any naturally occurring amino acid
  MISC_FEATURE (249)..(249): Xaa can be any naturally occurring amino acid
  MISC_FEATURE (250)..(250): Xaa can be any naturally occurring amino acid
  MISC_FEATURE (252)..(252): Xaa can be any naturally occurring amino acid except Pro or Gly
  MISC_FEATURE (253)..(253): Xaa can be any naturally occurring amino acid except Pro or Gly
  MISC_FEATURE (254)..(254): Xaa can be any naturally occurring amino acid except Pro or Gly
  MISC_FEATURE (256)..(256): Xaa can be any naturally occurring amino acid
  MISC_FEATURE (257)..(257): Xaa can be any naturally occurring amino acid
  MISC_FEATURE (258)..(258): Xaa can be any naturally occurring amino acid
  MISC_FEATURE (260)..(260): Xaa can be any naturally occurring amino acid except Pro or Gly
  MISC_FEATURE (261)..(261): Xaa can be any naturally occurring amino acid except Pro or Gly
  MISC_FEATURE (262)..(262): Xaa can be any naturally occurring amino acid except Pro or Gly
  MISC_FEATURE (264)..(264): Xaa can be any naturally occurring amino acid
  MISC_FEATURE (265)..(265): Xaa can be any naturally occurring amino acid
  MISC_FEATURE (266)..(266): Xaa can be any naturally occurring amino acid
  MISC_FEATURE (268)..(268): Xaa can be any naturally occurring amino acid except Pro or Gly
  MISC_FEATURE (269)..(269): Xaa can be any naturally occurring amino acid except Pro or Gly
  MISC_FEATURE (270)..(270): Xaa can be any naturally occurring amino acid except Pro or Gly
  MISC_FEATURE (272)..(272): Xaa can be any naturally occurring amino acid
  MISC_FEATURE (273)..(273): Xaa can be any naturally occurring amino acid
  MISC_FEATURE (274)..(274): Xaa can be any naturally occurring amino acid
  MISC_FEATURE (276)..(276): Xaa can be any naturally occurring amino acid except Pro or Gly
  MISC_FEATURE (277)..(277): Xaa can be any naturally occurring amino acid except Pro or Gly
  MISC_FEATURE (278)..(278): Xaa can be any naturally occurring amino acid except Pro or Gly
  MISC_FEATURE (280)..(280): Xaa can be any naturally occurring amino acid
  MISC_FEATURE (281)..(281): Xaa can be any naturally occurring amino acid
  MISC_FEATURE (282)..(282): Xaa can be any naturally occurring amino acid
  MISC_FEATURE (284)..(284): Xaa can be any naturally occurring amino acid except Pro or Gly
  MISC_FEATURE (285)..(285): Xaa can be any naturally occurring amino acid except Pro or Gly
  MISC_FEATURE (286)..(286): Xaa can be any naturally occurring amino acid except Pro or Gly
  MISC_FEATURE (288)..(288): Xaa can be any naturally occurring amino acid
  MISC_FEATURE (289)..(289): Xaa can be any naturally occurring amino acid
  MISC_FEATURE (290)..(290): Xaa can be any naturally occurring amino acid
  MISC_FEATURE (292)..(292): Xaa can be any naturally occurring amino acid except Pro or Gly
  MISC_FEATURE (293)..(293): Xaa can be any naturally occurring amino acid except Pro or Gly
  MISC_FEATURE (294)..(294): Xaa can be any naturally occurring amino acid except Pro or Gly
  MISC_FEATURE (296)..(296): Xaa can be any naturally occurring amino acid
  MISC_FEATURE (297)..(297): Xaa can be any naturally occurring amino acid
  MISC_FEATURE (298)..(298): Xaa can be any naturally occurring amino acid
  MISC_FEATURE (300)..(300): Xaa can be any naturally occurring amino acid except Pro or Gly
  MISC_FEATURE (301)..(301): Xaa can be any naturally occurring amino acid except Pro or Gly
  MISC_FEATURE (302)..(302): Xaa can be any naturally occurring amino acid except Pro or Gly
  MISC_FEATURE (304)..(304): Xaa can be any naturally occurring amino acid
  MISC_FEATURE (305)..(305): Xaa can be any naturally occurring amino acid
  MISC_FEATURE (306)..(306): Xaa can be any naturally occurring amino acid
  MISC_FEATURE (308)..(308): Xaa can be any naturally occurring amino acid except Pro or Gly
  MISC_FEATURE (309)..(309): Xaa can be any naturally occurring amino acid except Pro or Gly
  MISC_FEATURE (310)..(310): Xaa can be any naturally occurring amino acid except Pro or Gly
  MISC_FEATURE (312)..(312): Xaa can be any naturally occurring amino acid
  MISC_FEATURE (313)..(313): Xaa can be any naturally occurring amino acid
  MISC_FEATURE (314)..(314): Xaa can be any naturally occurring amino acid
  MISC_FEATURE (316)..(316): Xaa can be any naturally occurring amino acid except Pro or Gly
  MISC_FEATURE (317)..(317): Xaa can be any naturally occurring amino acid except Pro or Gly
  MISC_FEATURE (318)..(318): Xaa can be any naturally occurring amino acid except Pro or Gly
  MISC_FEATURE (320)..(320): Xaa can be any naturally occurring amino acid
  MISC_FEATURE (321)..(321): Xaa can be any naturally occurring amino acid
  MISC_FEATURE (322)..(322): Xaa can be any naturally occurring amino acid
  MISC_FEATURE (324)..(324): Xaa can be any naturally occurring amino acid except Pro or Gly
  MISC_FEATURE (325)..(325): Xaa can be any naturally occurring amino acid except Pro or Gly
  MISC_FEATURE (326)..(326): Xaa can be any naturally occurring amino acid except Pro or Gly
  MISC_FEATURE (328)..(328): Xaa can be any naturally occurring amino acid
  MISC_FEATURE (329)..(329): Xaa can be any naturally occurring amino acid
  MISC_FEATURE (330)..(330): Xaa can be any naturally occurring amino acid
  MISC_FEATURE (332)..(332): Xaa can be any naturally occurring amino acid except Pro or Gly
  MISC_FEATURE (333)..(333): Xaa can be any naturally occurring amino acid except Pro or Gly
  MISC_FEATURE (334)..(334): Xaa can be any naturally occurring amino acid except Pro or Gly
  MISC_FEATURE (336)..(336): Xaa can be any naturally occurring amino acid
  MISC_FEATURE (337)..(337): Xaa can be any naturally occurring amino acid
  MISC_FEATURE (338)..(338): Xaa can be any naturally occurring amino acid
  MISC_FEATURE (340)..(340): Xaa can be any naturally occurring amino acid except Pro or Gly
  MISC_FEATURE (341)..(341): Xaa can be any naturally occurring amino acid except Pro or Gly
  MISC_FEATURE (342)..(342): Xaa can be any naturally occurring amino acid except Pro or Gly
  MISC_FEATURE (344)..(344): Xaa can be any naturally occurring amino acid
  MISC_FEATURE (345)..(345): Xaa can be any naturally occurring amino acid
  MISC_FEATURE (346)..(346): Xaa can be any naturally occurring amino acid
  MISC_FEATURE (348)..(348): Xaa can be any naturally occurring amino acid except Pro or Gly
  MISC_FEATURE (349)..(349): Xaa can be any naturally occurring amino acid except Pro or Gly
  MISC_FEATURE (350)..(350): Xaa can be any naturally occurring amino acid except Pro or Gly
  MISC_FEATURE (352)..(352): Xaa can be any naturally occurring amino acid
  MISC_FEATURE (353)..(353): Xaa can be any naturally occurring amino acid
  MISC_FEATURE (354)..(354): Xaa can be any naturally occurring amino acid
  MISC_FEATURE (356)..(356): Xaa can be any naturally occurring amino acid except Pro or Gly
  MISC_FEATURE (357)..(357): Xaa can be any naturally occurring amino acid except Pro or Gly
  MISC_FEATURE (358)..(358): Xaa can be any naturally occurring amino acid except Pro or Gly
  MISC_FEATURE (360)..(360): Xaa can be any naturally occurring amino acid
  MISC_FEATURE (361)..(361): Xaa can be any naturally occurring amino acid
  MISC_FEATURE (362)..(362): Xaa can be any naturally occurring amino acid
  MISC_FEATURE (364)..(364): Xaa can be any naturally occurring amino acid except Pro or Gly
  MISC_FEATURE (365)..(365): Xaa can be any naturally occurring amino acid except Pro or Gly
  MISC_FEATURE (366)..(366): Xaa can be any naturally occurring amino acid except Pro or Gly
  MISC_FEATURE (368)..(368): Xaa can be any naturally occurring amino acid
  MISC_FEATURE (369)..(369): Xaa can be any naturally occurring amino acid
  MISC_FEATURE (370)..(370): Xaa can be any naturally occurring amino acid
  MISC_FEATURE (372)..(372): Xaa can be any naturally occurring amino acid except Pro or Gly
  MISC_FEATURE (373)..(373): Xaa can be any naturally occurring amino acid except Pro or Gly
  MISC_FEATURE (374)..(374): Xaa can be any naturally occurring amino acid except Pro or Gly
  MISC_FEATURE (376)..(376): Xaa can be any naturally occurring amino acid
  MISC_FEATURE (377)..(377): Xaa can be any naturally occurring amino acid
  MISC_FEATURE (378)..(378): Xaa can be any naturally occurring amino acid
  MISC_FEATURE (380)..(380): Xaa can be any naturally occurring amino acid except Pro or Gly
  MISC_FEATURE (381)..(381): Xaa can be any naturally occurring amino acid except Pro or Gly
  MISC_FEATURE (382)..(382): Xaa can be any naturally occurring amino acid except Pro or Gly
  MISC_FEATURE (384)..(384): Xaa can be any naturally occurring amino acid
  MISC_FEATURE (385)..(385): Xaa can be any naturally occurring amino acid
  MISC_FEATURE (386)..(386): Xaa can be any naturally occurring amino acid
  MISC_FEATURE (388)..(388): Xaa can be any naturally occurring amino acid except Pro or Gly
  MISC_FEATURE (389)..(389): Xaa can be any naturally occurring amino acid except Pro or Gly
  MISC_FEATURE (390)..(390): Xaa can be any naturally occurring amino acid except Pro or Gly
  MISC_FEATURE (392)..(392): Xaa can be any naturally occurring amino acid
  MISC_FEATURE (393)..(393): Xaa can be any naturally occurring amino acid
  MISC_FEATURE (394)..(394): Xaa can be any naturally occurring amino acid
  MISC_FEATURE (396)..(396): Xaa can be any naturally occurring amino acid except Pro or Gly
  MISC_FEATURE (397)..(397): Xaa can be any naturally occurring amino acid except Pro or Gly
  MISC_FEATURE (398)..(398): Xaa can be any naturally occurring amino acid except Pro or Gly
  MISC_FEATURE (400)..(400): Xaa can be any naturally occurring amino acid
  MISC_FEATURE (401)..(401): Xaa can be any naturally occurring amino acid
  MISC_FEATURE (402)..(402): Xaa can be any naturally occurring amino acid
  MISC_FEATURE (404)..(404): Xaa can be any naturally occurring amino acid except Pro or Gly
  MISC_FEATURE (405)..(405): Xaa can be any naturally occurring amino acid except Pro or Gly
  MISC_FEATURE (406)..(406): Xaa can be any naturally occurring amino acid except Pro or Gly
  MISC_FEATURE (408)..(408): Xaa can be any naturally occurring amino acid
  MISC_FEATURE (409)..(409): Xaa can be any naturally occurring amino acid
  MISC_FEATURE (410)..(410): Xaa can be any naturally occurring amino acid
  MISC_FEATURE (412)..(412): Xaa can be any naturally occurring amino acid except Pro or Gly
  MISC_FEATURE (413)..(413): Xaa can be any naturally occurring amino acid except Pro or Gly
  MISC_FEATURE (414)..(414): Xaa can be any naturally occurring amino acid except Pro or Gly
  MISC_FEATURE (416)..(416): Xaa can be any naturally occurring amino acid
  MISC_FEATURE (417)..(417): Xaa can be any naturally occurring amino acid
  MISC_FEATURE (418)..(418): Xaa can be any naturally occurring amino acid
  MISC_FEATURE (420)..(420): Xaa can be any naturally occurring amino acid except Pro or Gly
  MISC_FEATURE (421)..(421): Xaa can be any naturally occurring amino acid except Pro or Gly
  MISC_FEATURE (422)..(422): Xaa can be any naturally occurring amino acid except Pro or Gly
  MISC_FEATURE (424)..(424): Xaa can be any naturally occurring amino acid
  MISC_FEATURE (425)..(425): Xaa can be any naturally occurring amino acid
  MISC_FEATURE (426)..(426): Xaa can be any naturally occurring amino acid
  MISC_FEATURE (428)..(428): Xaa can be any naturally occurring amino acid except Pro or Gly
  MISC_FEATURE (429)..(429): Xaa can be any naturally occurring amino acid except Pro or Gly
  MISC_FEATURE (430)..(430): Xaa can be any naturally occurring amino acid except Pro or Gly
  MISC_FEATURE (432)..(432): Xaa can be any naturally occurring amino acid
  MISC_FEATURE (433)..(433): Xaa can be any naturally occurring amino acid
  MISC_FEATURE (434)..(434): Xaa can be any naturally occurring amino acid
  MISC_FEATURE (436)..(436): Xaa can be any naturally occurring amino acid except Pro or Gly
  MISC_FEATURE (437)..(437): Xaa can be any naturally occurring amino acid except Pro or Gly
  MISC_FEATURE (438)..(438): Xaa can be any naturally occurring amino acid except Pro or Gly
  MISC_FEATURE (440)..(440): Xaa can be any naturally occurring amino acid
  MISC_FEATURE (441)..(441): Xaa can be any naturally occurring amino acid
  MISC_FEATURE (442)..(442): Xaa can be any naturally occurring amino acid
  MISC_FEATURE (444)..(444): Xaa can be any naturally occurring amino acid except Pro or Gly
  MISC_FEATURE (445)..(445): Xaa can be any naturally occurring amino acid except Pro or Gly
  MISC_FEATURE (446)..(446): Xaa can be any naturally occurring amino acid except Pro or Gly
  MISC_FEATURE (448)..(448): Xaa can be any naturally occurring amino acid
  MISC_FEATURE (449)..(449): Xaa can be any naturally occurring amino acid
  MISC_FEATURE (450)..(450): Xaa can be any naturally occurring amino acid
  MISC_FEATURE (452)..(452): Xaa can be any naturally occurring amino acid except Pro or Gly
  MISC_FEATURE (453)..(453): Xaa can be any naturally occurring amino acid except Pro or Gly
  MISC_FEATURE (454)..(454): Xaa can be any naturally occurring amino acid except Pro or Gly
  MISC_FEATURE (456)..(456): Xaa can be any naturally occurring amino acid
  MISC_FEATURE (457)..(457): Xaa can be any naturally occurring amino acid
  MISC_FEATURE (458)..(458): Xaa can be any naturally occurring amino acid
  MISC_FEATURE (460)..(460): Xaa can be any naturally occurring amino acid except Pro or Gly
  MISC_FEATURE (461)..(461): Xaa can be any naturally occurring amino acid except Pro or Gly
  MISC_FEATURE (462)..(462): Xaa can be any naturally occurring amino acid except Pro or Gly
  MISC_FEATURE (464)..(464): Xaa can be any naturally occurring amino acid
  MISC_FEATURE (465)..(465): Xaa can be any naturally occurring amino acid
  MISC_FEATURE (466)..(466): Xaa can be any naturally occurring amino acid
  MISC_FEATURE (468)..(468): Xaa can be any naturally occurring amino acid except Pro or Gly
  MISC_FEATURE (469)..(469): Xaa can be any naturally occurring amino acid except Pro or Gly
  MISC_FEATURE (470)..(470): Xaa can be any naturally occurring amino acid except Pro or Gly
  MISC_FEATURE (472)..(472): Xaa can be any naturally occurring amino acid
  MISC_FEATURE (473)..(473): Xaa can be any naturally occurring amino acid
  MISC_FEATURE (474)..(474): Xaa can be any naturally occurring amino acid
  MISC_FEATURE (476)..(476): Xaa can be any naturally occurring amino acid except Pro or Gly
  MISC_FEATURE (477)..(477): Xaa can be any naturally occurring amino acid except Pro or Gly
  MISC_FEATURE (478)..(478): Xaa can be any naturally occurring amino acid except Pro or Gly
  MISC_FEATURE (480)..(480): Xaa can be any naturally occurring amino acid
  MISC_FEATURE (481)..(481): Xaa can be any naturally occurring amino acid
  MISC_FEATURE (482)..(482): Xaa can be any naturally occurring amino acid
  MISC_FEATURE (484)..(484): Xaa can be any naturally occurring amino acid except Pro or Gly
  MISC_FEATURE (485)..(485): Xaa can be any naturally occurring amino acid except Pro or Gly
  MISC_FEATURE (486)..(486): Xaa can be any naturally occurring amino acid except Pro or Gly
  MISC_FEATURE (488)..(488): Xaa can be any naturally occurring amino acid
  MISC_FEATURE (489)..(489): Xaa can be any naturally occurring amino acid
  MISC_FEATURE (490)..(490): Xaa can be any naturally occurring amino acid
  MISC_FEATURE (492)..(492): Xaa can be any naturally occurring amino acid except Pro or Gly
  MISC_FEATURE (493)..(493): Xaa can be any naturally occurring amino acid except Pro or Gly
  MISC_FEATURE (494)..(494): Xaa can be any naturally occurring amino acid except Pro or Gly
  MISC_FEATURE (496)..(496): Xaa can be any naturally occurring amino acid
  MISC_FEATURE (497)..(497): Xaa can be any naturally occurring amino acid
  MISC_FEATURE (498)..(498): Xaa can be any naturally occurring amino acid
  MISC_FEATURE (500)..(500): Xaa can be any naturally occurring amino acid except Pro or Gly
  MISC_FEATURE (501)..(501): Xaa can be any naturally occurring amino acid except Pro or Gly
  MISC_FEATURE (502)..(502): Xaa can be any naturally occurring amino acid except Pro or Gly
  MISC_FEATURE (504)..(504): Xaa can be any naturally occurring amino acid
  MISC_FEATURE (505)..(505): Xaa can be any naturally occurring amino acid
  MISC_FEATURE (506)..(506): Xaa can be any naturally occurring amino acid
  MISC_FEATURE (508)..(508): Xaa can be any naturally occurring amino acid except Pro or Gly
  MISC_FEATURE (509)..(509): Xaa can be any naturally occurring amino acid except Pro or Gly
  MISC_FEATURE (510)..(510): Xaa can be any naturally occurring amino acid except Pro or Gly
  MISC_FEATURE (512)..(512): Xaa can be any naturally occurring amino acid
  MISC_FEATURE (513)..(513): Xaa can be any naturally occurring amino acid
  MISC_FEATURE (514)..(514): Xaa can be any naturally occurring amino acid
  MISC_FEATURE (516)..(516): Xaa can be any naturally occurring amino acid except Pro or Gly
  MISC_FEATURE (517)..(517): Xaa can be any naturally occurring amino acid except Pro or Gly
  MISC_FEATURE (518)..(518): Xaa can be any naturally occurring amino acid except Pro or Gly
  MISC_FEATURE (520)..(520): Xaa can be any naturally occurring amino acid
  MISC_FEATURE (521)..(521): Xaa can be any naturally occurring amino acid
  MISC_FEATURE (522)..(522): Xaa can be any naturally occurring amino acid
  MISC_FEATURE (524)..(524): Xaa can be any naturally occurring amino acid except Pro or Gly
  MISC_FEATURE (525)..(525): Xaa can be any naturally occurring amino acid except Pro or Gly
  MISC_FEATURE (526)..(526): Xaa can be any naturally occurring amino acid except Pro or Gly
  MISC_FEATURE (528)..(528): Xaa can be any naturally occurring amino acid
  MISC_FEATURE (529)..(529): Xaa can be any naturally occurring amino acid
  MISC_FEATURE (530)..(530): Xaa can be any naturally occurring amino acid
  MISC_FEATURE (532)..(532): Xaa can be any naturally occurring amino acid except Pro or Gly
  MISC_FEATURE (533)..(533): Xaa can be any naturally occurring amino acid except Pro or Gly
  MISC_FEATURE (534)..(534): Xaa can be any naturally occurring amino acid except Pro or Gly
  MISC_FEATURE (536)..(536): Xaa can be any naturally occurring amino acid
  MISC_FEATURE (537)..(537): Xaa can be any naturally occurring amino acid
  MISC_FEATURE (538)..(538): Xaa can be any naturally occurring amino acid
  MISC_FEATURE (540)..(540): Xaa can be any naturally occurring amino acid except Pro or Gly
  MISC_FEATURE (541)..(541): Xaa can be any naturally occurring amino acid except Pro or Gly
  MISC_FEATURE (542)..(542): Xaa can be any naturally occurring amino acid except Pro or Gly
  MISC_FEATURE (544)..(544): Xaa can be any naturally occurring amino acid
  MISC_FEATURE (545)..(545): Xaa can be any naturally occurring amino acid
  MISC_FEATURE (546)..(546): Xaa can be any naturally occurring amino acid
  MISC_FEATURE (548)..(548): Xaa can be any naturally occurring amino acid except Pro or Gly
  MISC_FEATURE (549)..(549): Xaa can be any naturally occurring amino acid except Pro or Gly
  MISC_FEATURE (550)..(550): Xaa can be any naturally occurring amino acid except Pro or Gly
  MISC_FEATURE (552)..(552): Xaa can be any naturally occurring amino acid
  MISC_FEATURE (553)..(553): Xaa can be any naturally occurring amino acid
  MISC_FEATURE (554)..(554): Xaa can be any naturally occurring amino acid
  MISC_FEATURE (556)..(556): Xaa can be any naturally occurring amino acid except Pro or Gly
  MISC_FEATURE (557)..(557): Xaa can be any naturally occurring amino acid except Pro or Gly
  MISC_FEATURE (558)..(558): Xaa can be any naturally occurring amino acid except Pro or Gly
  MISC_FEATURE (560)..(560): Xaa can be any naturally occurring amino acid
  MISC_FEATURE (561)..(561): Xaa can be any naturally occurring amino acid
  MISC_FEATURE (562)..(562): Xaa can be any naturally occurring amino acid
  MISC_FEATURE (564)..(564): Xaa can be any naturally occurring amino acid except Pro or Gly
  MISC_FEATURE (565)..(565): Xaa can be any naturally occurring amino acid except Pro or Gly
  MISC_FEATURE (566)..(566): Xaa can be any naturally occurring amino acid except Pro or Gly
  MISC_FEATURE (568)..(568): Xaa can be any naturally occurring amino acid
  MISC_FEATURE (569)..(569): Xaa can be any naturally occurring amino acid
  MISC_FEATURE (570)..(570): Xaa can be any naturally occurring amino acid
  MISC_FEATURE (572)..(572): Xaa can be any naturally occurring amino acid except Pro or Gly
  MISC_FEATURE (573)..(573): Xaa can be any naturally occurring amino acid except Pro or Gly
  MISC_FEATURE (574)..(574): Xaa can be any naturally occurring amino acid except Pro or Gly
  MISC_FEATURE (576)..(576): Xaa can be any naturally occurring amino acid
  MISC_FEATURE (577)..(577): Xaa can be any naturally occurring amino acid
  MISC_FEATURE (578)..(578): Xaa can be any naturally occurring amino acid
  MISC_FEATURE (580)..(580): Xaa can be any naturally occurring amino acid except Pro or Gly
  MISC_FEATURE (581)..(581): Xaa can be any naturally occurring amino acid except Pro or Gly
  MISC_FEATURE (582)..(582): Xaa can be any naturally occurring amino acid except Pro or Gly
  MISC_FEATURE (584)..(584): Xaa can be any naturally occurring amino acid
  MISC_FEATURE (585)..(585): Xaa can be any naturally occurring amino acid
  MISC_FEATURE (586)..(586): Xaa can be any naturally occurring amino acid
  MISC_FEATURE (588)..(588): Xaa can be any naturally occurring amino acid except Pro or Gly
  MISC_FEATURE (589)..(589): Xaa can be any naturally occurring amino acid except Pro or Gly
  MISC_FEATURE (590)..(590): Xaa can be any naturally occurring amino acid except Pro or Gly
  MISC_FEATURE (592)..(592): Xaa can be any naturally occurring amino acid
  MISC_FEATURE (593)..(593): Xaa can be any naturally occurring amino acid
  MISC_FEATURE (594)..(594): Xaa can be any naturally occurring amino acid
  MISC_FEATURE (596)..(596): Xaa can be any naturally occurring amino acid except Pro or Gly
  MISC_FEATURE (597)..(597): Xaa can be any naturally occurring amino acid except Pro or Gly
  MISC_FEATURE (598)..(598): Xaa can be any naturally occurring amino acid except Pro or Gly
  MISC_FEATURE (600)..(600): Xaa can be any naturally occurring amino acid
  MISC_FEATURE (601)..(601): Xaa can be any naturally occurring amino acid
  MISC_FEATURE (602)..(602): Xaa can be any naturally occurring amino acid
  MISC_FEATURE (604)..(604): Xaa can be any naturally occurring amino acid except Pro or Gly
  MISC_FEATURE (605)..(605): Xaa can be any naturally occurring amino acid except Pro or Gly
  MISC_FEATURE (606)..(606): Xaa can be any naturally occurring amino acid except Pro or Gly
  MISC_FEATURE (608)..(608): Xaa can be any naturally occurring amino acid
  MISC_FEATURE (609)..(609): Xaa can be any naturally occurring amino acid
  MISC_FEATURE (610)..(610): Xaa can be any naturally occurring amino acid
  MISC_FEATURE (612)..(612): Xaa can be any naturally occurring amino acid except Pro or Gly
  MISC_FEATURE (613)..(613): Xaa can be any naturally occurring amino acid except Pro or Gly
  MISC_FEATURE (614)..(614): Xaa can be any naturally occurring amino acid except Pro or Gly
  MISC_FEATURE (616)..(616): Xaa can be any naturally occurring amino acid
  MISC_FEATURE (617)..(617): Xaa can be any naturally occurring amino acid
  MISC_FEATURE (618)..(618): Xaa can be any naturally occurring amino acid
  MISC_FEATURE (620)..(620): Xaa can be any naturally occurring amino acid except Pro or Gly
  MISC_FEATURE (621)..(621): Xaa can be any naturally occurring amino acid except Pro or Gly
  MISC_FEATURE (622)..(622): Xaa can be any naturally occurring amino acid except Pro or Gly
  MISC_FEATURE (624)..(624): Xaa can be any naturally occurring amino acid
  MISC_FEATURE (625)..(625): Xaa can be any naturally occurring amino acid
  MISC_FEATURE (626)..(626): Xaa can be any naturally occurring amino acid
  MISC_FEATURE (628)..(628): Xaa can be any naturally occurring amino acid except Pro or Gly
  MISC_FEATURE (629)..(629): Xaa can be any naturally occurring amino acid except Pro or Gly
  MISC_FEATURE (630)..(630): Xaa can be any naturally occurring amino acid except Pro or Gly
  MISC_FEATURE (632)..(632): Xaa can be any naturally occurring amino acid
  MISC_FEATURE (633)..(633): Xaa can be any naturally occurring amino acid
  MISC_FEATURE (634)..(634): Xaa can be any naturally occurring amino acid
  MISC_FEATURE (636)..(636): Xaa can be any naturally occurring amino acid except Pro or Gly
  MISC_FEATURE (637)..(637): Xaa can be any naturally occurring amino acid except Pro or Gly
  MISC_FEATURE (638)..(638): Xaa can be any naturally occurring amino acid except Pro or Gly
  MISC_FEATURE (640)..(640): Xaa can be any naturally occurring amino acid
  MISC_FEATURE (641)..(641): Xaa can be any naturally occurring amino acid
  MISC_FEATURE (642)..(642): Xaa can be any naturally occurring amino acid
  MISC_FEATURE (644)..(644): Xaa can be any naturally occurring amino acid except Pro or Gly
  MISC_FEATURE (645)..(645): Xaa can be any naturally occurring amino acid except Pro or Gly
  MISC_FEATURE (646)..(646): Xaa can be any naturally occurring amino acid except Pro or Gly
  MISC_FEATURE (648)..(648): Xaa can be any naturally occurring amino acid
  MISC_FEATURE (649)..(649): Xaa can be any naturally occurring amino acid
  MISC_FEATURE (650)..(650): Xaa can be any naturally occurring amino acid
  MISC_FEATURE (652)..(652): Xaa can be any naturally occurring amino acid except Pro or Gly
  MISC_FEATURE (653)..(653): Xaa can be any naturally occurring amino acid except Pro or Gly
  MISC_FEATURE (654)..(654): Xaa can be any naturally occurring amino acid except Pro or Gly
  MISC_FEATURE (656)..(656): Xaa can be any naturally occurring amino acid
  MISC_FEATURE (657)..(657): Xaa can be any naturally occurring amino acid
  MISC_FEATURE (658)..(658): Xaa can be any naturally occurring amino acid
  MISC_FEATURE (660)..(660): Xaa can be any naturally occurring amino acid except Pro or Gly
  MISC_FEATURE (661)..(661): Xaa can be any naturally occurring amino acid except Pro or Gly
  MISC_FEATURE (662)..(662): Xaa can be any naturally occurring amino acid except Pro or Gly
  MISC_FEATURE (664)..(664): Xaa can be any naturally occurring amino acid
  MISC_FEATURE (665)..(665): Xaa can be any naturally occurring amino acid
  MISC_FEATURE (666)..(666): Xaa can be any naturally occurring amino acid
  MISC_FEATURE (668)..(668): Xaa can be any naturally occurring amino acid except Pro or Gly
  MISC_FEATURE (669)..(669): Xaa can be any naturally occurring amino acid except Pro or Gly
  MISC_FEATURE (670)..(670): Xaa can be any naturally occurring amino acid except Pro or Gly
  MISC_FEATURE (672)..(672): Xaa can be any naturally occurring amino acid
  MISC_FEATURE (673)..(673): Xaa can be any naturally occurring amino acid
  MISC_FEATURE (674)..(674): Xaa can be any naturally occurring amino acid
  MISC_FEATURE (676)..(676): Xaa can be any naturally occurring amino acid except Pro or Gly
  MISC_FEATURE (677)..(677): Xaa can be any naturally occurring amino acid except Pro or Gly
  MISC_FEATURE (678)..(678): Xaa can be any naturally occurring amino acid except Pro or Gly
  MISC_FEATURE (680)..(680): Xaa can be any naturally occurring amino acid
  MISC_FEATURE (681)..(681): Xaa can be any naturally occurring amino acid
  MISC_FEATURE (682)..(682): Xaa can be any naturally occurring amino acid
  MISC_FEATURE (684)..(684): Xaa can be any naturally occurring amino acid except Pro or Gly
  MISC_FEATURE (685)..(685): Xaa can be any naturally occurring amino acid except Pro or Gly
  MISC_FEATURE (686)..(686): Xaa can be any naturally occurring amino acid except Pro or Gly
  MISC_FEATURE (688)..(688): Xaa can be any naturally occurring amino acid
  MISC_FEATURE (689)..(689): Xaa can be any naturally occurring amino acid
  MISC_FEATURE (690)..(690): Xaa can be any naturally occurring amino acid
  MISC_FEATURE (692)..(692): Xaa can be any naturally occurring amino acid except Pro or Gly
  MISC_FEATURE (693)..(693): Xaa can be any naturally occurring amino acid except Pro or Gly
  MISC_FEATURE (694)..(694): Xaa can be any naturally occurring amino acid except Pro or Gly
  MISC_FEATURE (696)..(696): Xaa can be any naturally occurring amino acid
  MISC_FEATURE (697)..(697): Xaa can be any naturally occurring amino acid
  MISC_FEATURE (698)..(698): Xaa can be any naturally occurring amino acid
  MISC_FEATURE (700)..(700): Xaa can be any naturally occurring amino acid except Pro or Gly
  MISC_FEATURE (701)..(701): Xaa can be any naturally occurring amino acid except Pro or Gly
  MISC_FEATURE (702)..(702): Xaa can be any naturally occurring amino acid except Pro or Gly
  MISC_FEATURE (704)..(704): Xaa can be any naturally occurring amino acid
  MISC_FEATURE (705)..(705): Xaa can be any naturally occurring amino acid
  MISC_FEATURE (706)..(706): Xaa can be any naturally occurring amino acid
  MISC_FEATURE (708)..(708): Xaa can be any naturally occurring amino acid except Pro or Gly
  MISC_FEATURE (709)..(709): Xaa can be any naturally occurring amino acid except Pro or Gly
  MISC_FEATURE (710)..(710): Xaa can be any naturally occurring amino acid except Pro or Gly
  MISC_FEATURE (712)..(712): Xaa can be any naturally occurring amino acid
  MISC_FEATURE (713)..(713): Xaa can be any naturally occurring amino acid
  MISC_FEATURE (714)..(714): Xaa can be any naturally occurring amino acid
  MISC_FEATURE (716)..(716): Xaa can be any naturally occurring amino acid except Pro or Gly
  MISC_FEATURE (717)..(717): Xaa can be any naturally occurring amino acid except Pro or Gly
  MISC_FEATURE (718)..(718): Xaa can be any naturally occurring amino acid except Pro or Gly
  MISC_FEATURE (720)..(720): Xaa can be any naturally occurring amino acid
  MISC_FEATURE (721)..(721): Xaa can be any naturally occurring amino acid
  MISC_FEATURE (722)..(722): Xaa can be any naturally occurring amino acid
  MISC_FEATURE (724)..(724): Xaa can be any naturally occurring amino acid except Pro or Gly
  MISC_FEATURE (725)..(725): Xaa can be any naturally occurring amino acid except Pro or Gly
  MISC_FEATURE (726)..(726): Xaa can be any naturally occurring amino acid except Pro or Gly
  MISC_FEATURE (728)..(728): Xaa can be any naturally occurring amino acid
  MISC_FEATURE (729)..(729): Xaa can be any naturally occurring amino acid
  MISC_FEATURE (730)..(730): Xaa can be any naturally occurring amino acid
  MISC_FEATURE (732)..(732): Xaa can be any naturally occurring amino acid except Pro or Gly
  MISC_FEATURE (733)..(733): Xaa can be any naturally occurring amino acid except Pro or Gly
  MISC_FEATURE (734)..(734): Xaa can be any naturally occurring amino acid except Pro or Gly
  MISC_FEATURE (736)..(736): Xaa can be any naturally occurring amino acid
  MISC_FEATURE (737)..(737): Xaa can be any naturally occurring amino acid
  MISC_FEATURE (738)..(738): Xaa can be any naturally occurring amino acid
  MISC_FEATURE (740)..(740): Xaa can be any naturally occurring amino acid except Pro or Gly
  MISC_FEATURE (741)..(741): Xaa can be any naturally occurring amino acid except Pro or Gly
  MISC_FEATURE (742)..(742): Xaa can be any naturally occurring amino acid except Pro or Gly
  MISC_FEATURE (744)..(744): Xaa can be any naturally occurring amino acid
  MISC_FEATURE (745)..(745): Xaa can be any naturally occurring amino acid
  MISC_FEATURE (746)..(746): Xaa can be any naturally occurring amino acid
  MISC_FEATURE (748)..(748): Xaa can be any naturally occurring amino acid except Pro or Gly
  MISC_FEATURE (749)..(749): Xaa can be any naturally occurring amino acid except Pro or Gly
  MISC_FEATURE (750)..(750): Xaa can be any naturally occurring amino acid except Pro or Gly
  MISC_FEATURE (752)..(752): Xaa can be any naturally occurring amino acid
  MISC_FEATURE (753)..(753): Xaa can be any naturally occurring amino acid
  MISC_FEATURE (754)..(754): Xaa can be any naturally occurring amino acid
  MISC_FEATURE (756)..(756): Xaa can be any naturally occurring amino acid except Pro or Gly
  MISC_FEATURE (757)..(757): Xaa can be any naturally occurring amino acid except Pro or Gly
  MISC_FEATURE (758)..(758): Xaa can be any naturally occurring amino acid except Pro or Gly
  MISC_FEATURE (760)..(760): Xaa can be any naturally occurring amino acid
  MISC_FEATURE (761)..(761): Xaa can be any naturally occurring amino acid
  MISC_FEATURE (762)..(762): Xaa can be any naturally occurring amino acid
  MISC_FEATURE (764)..(764): Xaa can be any naturally occurring amino acid except Pro or Gly
  MISC_FEATURE (765)..(765): Xaa can be any naturally occurring amino acid except Pro or Gly
  MISC_FEATURE (766)..(766): Xaa can be any naturally occurring amino acid except Pro or Gly
  MISC_FEATURE (768)..(768): Xaa can be any naturally occurring amino acid
  MISC_FEATURE (769)..(769): Xaa can be any naturally occurring amino acid
  MISC_FEATURE (770)..(770): Xaa can be any naturally occurring amino acid
  MISC_FEATURE (772)..(772): Xaa can be any naturally occurring amino acid except Pro or Gly
  MISC_FEATURE (773)..(773): Xaa can be any naturally occurring amino acid except Pro or Gly
  MISC_FEATURE (774)..(774): Xaa can be any naturally occurring amino acid except Pro or Gly
  MISC_FEATURE (776)..(776): Xaa can be any naturally occurring amino acid
  MISC_FEATURE (777)..(777): Xaa can be any naturally occurring amino acid
  MISC_FEATURE (778)..(778): Xaa can be any naturally occurring amino acid
  MISC_FEATURE (780)..(780): Xaa can be any naturally occurring amino acid except Pro or Gly
  MISC_FEATURE (781)..(781): Xaa can be any naturally occurring amino acid except Pro or Gly
  MISC_FEATURE (782)..(782): Xaa can be any naturally occurring amino acid except Pro or Gly
  MISC_FEATURE (784)..(784): Xaa can be any naturally occurring amino acid
  MISC_FEATURE (785)..(785): Xaa can be any naturally occurring amino acid
  MISC_FEATURE (786)..(786): Xaa can be any naturally occurring amino acid
  MISC_FEATURE (788)..(788): Xaa can be any naturally occurring amino acid except Pro or Gly
  MISC_FEATURE (789)..(789): Xaa can be any naturally occurring amino acid except Pro or Gly
  MISC_FEATURE (790)..(790): Xaa can be any naturally occurring amino acid except Pro or Gly
  MISC_FEATURE (792)..(792): Xaa can be any naturally occurring amino acid
  MISC_FEATURE (793)..(793): Xaa can be any naturally occurring amino acid
  MISC_FEATURE (794)..(794): Xaa can be any naturally occurring amino acid
  MISC_FEATURE (796)..(796): Xaa can be any naturally occurring amino acid except Pro or Gly
  MISC_FEATURE (797)..(797): Xaa can be any naturally occurring amino acid except Pro or Gly
  MISC_FEATURE (798)..(798): Xaa can be any naturally occurring amino acid except Pro or Gly
  MISC_FEATURE (800)..(800): Xaa can be any naturally occurring amino acid
  MISC_FEATURE (801)..(801): Xaa can be any naturally occurring amino acid
  MISC_FEATURE (802)..(802): Xaa can be any naturally occurring amino acid
  MISC_FEATURE (804)..(804): Xaa can be any naturally occurring amino acid except Pro or Gly
  MISC_FEATURE (805)..(805): Xaa can be any naturally occurring amino acid except Pro or Gly
  MISC_FEATURE (806)..(806): Xaa can be any naturally occurring amino acid except Pro or Gly
  MISC_FEATURE (808)..(808): Xaa can be any naturally occurring amino acid
  MISC_FEATURE (809)..(809): Xaa can be any naturally occurring amino acid
  MISC_FEATURE (810)..(810): Xaa can be any naturally occurring amino acid
  MISC_FEATURE (812)..(812): Xaa can be any naturally occurring amino acid except Pro or Gly
  MISC_FEATURE (813)..(813): Xaa can be any naturally occurring amino acid except Pro or Gly
  MISC_FEATURE (814)..(814): Xaa can be any naturally occurring amino acid except Pro or Gly
  MISC_FEATURE (816)..(816): Xaa can be any naturally occurring amino acid
  MISC_FEATURE (817)..(817): Xaa can be any naturally occurring amino acid
  MISC_FEATURE (818)..(818): Xaa can be any naturally occurring amino acid
  MISC_FEATURE (820)..(820): Xaa can be any naturally occurring amino acid except Pro or Gly
  MISC_FEATURE (821)..(821): Xaa can be any naturally occurring amino acid except Pro or Gly
  MISC_FEATURE (822)..(822): Xaa can be any naturally occurring amino acid except Pro or Gly
  MISC_FEATURE (824)..(824): Xaa can be any naturally occurring amino acid
  MISC_FEATURE (825)..(825): Xaa can be any naturally occurring amino acid
  MISC_FEATURE (826)..(826): Xaa can be any naturally occurring amino acid
  MISC_FEATURE (828)..(828): Xaa can be any naturally occurring amino acid except Pro or Gly
  MISC_FEATURE (829)..(829): Xaa can be any naturally occurring amino acid except Pro or Gly
  MISC_FEATURE (830)..(830): Xaa can be any naturally occurring amino acid except Pro or Gly
  MISC_FEATURE (832)..(832): Xaa can be any naturally occurring amino acid
  MISC_FEATURE (833)..(833): Xaa can be any naturally occurring amino acid
  MISC_FEATURE (834)..(834): Xaa can be any naturally occurring amino acid
  MISC_FEATURE (836)..(836): Xaa can be any naturally occurring amino acid except Pro or Gly
  MISC_FEATURE (837)..(837): Xaa can be any naturally occurring amino acid except Pro or Gly
  MISC_FEATURE (838)..(838): Xaa can be any naturally occurring amino acid except Pro or Gly
  MISC_FEATURE (840)..(840): Xaa can be any naturally occurring amino acid
  MISC_FEATURE (841)..(841): Xaa can be any naturally occurring amino acid
  MISC_FEATURE (842)..(842): Xaa can be any naturally occurring amino acid
  MISC_FEATURE (844)..(844): Xaa can be any naturally occurring amino acid except Pro or Gly
  MISC_FEATURE (845)..(845): Xaa can be any naturally occurring amino acid except Pro or Gly
  MISC_FEATURE (846)..(846): Xaa can be any naturally occurring amino acid except Pro or Gly
  MISC_FEATURE (848)..(848): Xaa can be any naturally occurring amino acid
  MISC_FEATURE (849)..(849): Xaa can be any naturally occurring amino acid
  MISC_FEATURE (850)..(850): Xaa can be any naturally occurring amino acid
  MISC_FEATURE (852)..(852): Xaa can be any naturally occurring amino acid except Pro or Gly
  MISC_FEATURE (853)..(853): Xaa can be any naturally occurring amino acid except Pro or Gly
  MISC_FEATURE (854)..(854): Xaa can be any naturally occurring amino acid except Pro or Gly
  MISC_FEATURE (856)..(856): Xaa can be any naturally occurring amino acid
  MISC_FEATURE (857)..(857): Xaa can be any naturally occurring amino acid
  MISC_FEATURE (858)..(858): Xaa can be any naturally occurring amino acid
  MISC_FEATURE (860)..(860): Xaa can be any naturally occurring amino acid except Pro or Gly
  MISC_FEATURE (861)..(861): Xaa can be any naturally occurring amino acid except Pro or Gly
  MISC_FEATURE (862)..(862): Xaa can be any naturally occurring amino acid except Pro or Gly
  MISC_FEATURE (864)..(864): Xaa can be any naturally occurring amino acid
  MISC_FEATURE (865)..(865): Xaa can be any naturally occurring amino acid
  MISC_FEATURE (866)..(866): Xaa can be any naturally occurring amino acid
  MISC_FEATURE (868)..(868): Xaa can be any naturally occurring amino acid except Pro or Gly
  MISC_FEATURE (869)..(869): Xaa can be any naturally occurring amino acid except Pro or Gly
  MISC_FEATURE (870)..(870): Xaa can be any naturally occurring amino acid except Pro or Gly
  MISC_FEATURE (872)..(872): Xaa can be any naturally occurring amino acid
  MISC_FEATURE (873)..(873): Xaa can be any naturally occurring amino acid
  MISC_FEATURE (874)..(874): Xaa can be any naturally occurring amino acid
  MISC_FEATURE (876)..(876): Xaa can be any naturally occurring amino acid except Pro or Gly
  MISC_FEATURE (877)..(877): Xaa can be any naturally occurring amino acid except Pro or Gly
  MISC_FEATURE (878)..(878): Xaa can be any naturally occurring amino acid except Pro or Gly
  MISC_FEATURE (880)..(880): Xaa can be any naturally occurring amino acid
  MISC_FEATURE (881)..(881): Xaa can be any naturally occurring amino acid
  MISC_FEATURE (882)..(882): Xaa can be any naturally occurring amino acid
  MISC_FEATURE (884)..(884): Xaa can be any naturally occurring amino acid except Pro or Gly
  MISC_FEATURE (885)..(885): Xaa can be any naturally occurring amino acid except Pro or Gly
  MISC_FEATURE (886)..(886): Xaa can be any naturally occurring amino acid except Pro or Gly
  MISC_FEATURE (888)..(888): Xaa can be any naturally occurring amino acid
  MISC_FEATURE (889)..(889): Xaa can be any naturally occurring amino acid
  MISC_FEATURE (890)..(890): Xaa can be any naturally occurring amino acid
  MISC_FEATURE (892)..(892): Xaa can be any naturally occurring amino acid except Pro or Gly
  MISC_FEATURE (893)..(893): Xaa can be any naturally occurring amino acid except Pro or Gly
  MISC_FEATURE (894)..(894): Xaa can be any naturally occurring amino acid except Pro or Gly
  MISC_FEATURE (896)..(896): Xaa can be any naturally occurring amino acid
  MISC_FEATURE (897)..(897): Xaa can be any naturally occurring amino acid
  MISC_FEATURE (898)..(898): Xaa can be any naturally occurring amino acid
  MISC_FEATURE (900)..(900): Xaa can be any naturally occurring amino acid except Pro or Gly
  MISC_FEATURE (901)..(901): Xaa can be any naturally occurring amino acid except Pro or Gly
  MISC_FEATURE (902)..(902): Xaa can be any naturally occurring amino acid except Pro or Gly
  MISC_FEATURE (904)..(904): Xaa can be any naturally occurring amino acid
  MISC_FEATURE (905)..(905): Xaa can be any naturally occurring amino acid
  MISC_FEATURE (906)..(906): Xaa can be any naturally occurring amino acid
  MISC_FEATURE (908)..(908): Xaa can be any naturally occurring amino acid except Pro or Gly
  MISC_FEATURE (909)..(909): Xaa can be any naturally occurring amino acid except Pro or Gly
  MISC_FEATURE (910)..(910): Xaa can be any naturally occurring amino acid except Pro or Gly
  MISC_FEATURE (912)..(912): Xaa can be any naturally occurring amino acid
  MISC_FEATURE (913)..(913): Xaa can be any naturally occurring amino acid
  MISC_FEATURE (914)..(914): Xaa can be any naturally occurring amino acid
  MISC_FEATURE (916)..(916): Xaa can be any naturally occurring amino acid except Pro or Gly
  MISC_FEATURE (917)..(917): Xaa can be any naturally occurring amino acid except Pro or Gly
  MISC_FEATURE (918)..(918): Xaa can be any naturally occurring amino acid except Pro or Gly
  MISC_FEATURE (920)..(920): Xaa can be any naturally occurring amino acid
  MISC_FEATURE (921)..(921): Xaa can be any naturally occurring amino acid
  MISC_FEATURE (922)..(922): Xaa can be any naturally occurring amino acid
  MISC_FEATURE (924)..(924): Xaa can be any naturally occurring amino acid except Pro or Gly
  MISC_FEATURE (925)..(925): Xaa can be any naturally occurring amino acid except Pro or Gly
  MISC_FEATURE (926)..(926): Xaa can be any naturally occurring amino acid except Pro or Gly
  MISC_FEATURE (928)..(928): Xaa can be any naturally occurring amino acid
  MISC_FEATURE (929)..(929): Xaa can be any naturally occurring amino acid
  MISC_FEATURE (930)..(930): Xaa can be any naturally occurring amino acid
  MISC_FEATURE (932)..(932): Xaa can be any naturally occurring amino acid except Pro or Gly
  MISC_FEATURE (933)..(933): Xaa can be any naturally occurring amino acid except Pro or Gly
  MISC_FEATURE (934)..(934): Xaa can be any naturally occurring amino acid except Pro or Gly
  MISC_FEATURE (936)..(936): Xaa can be any naturally occurring amino acid
  MISC_FEATURE (937)..(937): Xaa can be any naturally occurring amino acid
  MISC_FEATURE (938)..(938): Xaa can be any naturally occurring amino acid
  MISC_FEATURE (940)..(940): Xaa can be any naturally occurring amino acid except Pro or Gly
  MISC_FEATURE (941)..(941): Xaa can be any naturally occurring amino acid except Pro or Gly
  MISC_FEATURE (942)..(942): Xaa can be any naturally occurring amino acid except Pro or Gly
  MISC_FEATURE (944)..(944): Xaa can be any naturally occurring amino acid
  MISC_FEATURE (945)..(945): Xaa can be any naturally occurring amino acid
  MISC_FEATURE (946)..(946): Xaa can be any naturally occurring amino acid
  MISC_FEATURE (948)..(948): Xaa can be any naturally occurring amino acid except Pro or Gly
  MISC_FEATURE (949)..(949): Xaa can be any naturally occurring amino acid except Pro or Gly
  MISC_FEATURE (950)..(950): Xaa can be any naturally occurring amino acid except Pro or Gly
  MISC_FEATURE (952)..(952): Xaa can be any naturally occurring amino acid
  MISC_FEATURE (953)..(953): Xaa can be any naturally occurring amino acid
  MISC_FEATURE (954)..(954): Xaa can be any naturally occurring amino acid
  MISC_FEATURE (956)..(956): Xaa can be any naturally occurring amino acid except Pro or Gly
  MISC_FEATURE (957)..(957): Xaa can be any naturally occurring amino acid except Pro or Gly
  MISC_FEATURE (958)..(958): Xaa can be any naturally occurring amino acid except Pro or Gly
  MISC_FEATURE (960)..(960): Xaa can be any naturally occurring amino acid
  MISC_FEATURE (961)..(961): Xaa can be any naturally occurring amino acid
  MISC_FEATURE (962)..(962): Xaa can be any naturally occurring amino acid
  MISC_FEATURE (964)..(964): Xaa can be any naturally occurring amino acid except Pro or Gly
  MISC_FEATURE (965)..(965): Xaa can be any naturally occurring amino acid except Pro or Gly
  MISC_FEATURE (966)..(966): Xaa can be any naturally occurring amino acid except Pro or Gly
  MISC_FEATURE (968)..(968): Xaa can be any naturally occurring amino acid
  MISC_FEATURE (969)..(969): Xaa can be any naturally occurring amino acid
  MISC_FEATURE (970)..(970): Xaa can be any naturally occurring amino acid
  MISC_FEATURE (972)..(972): Xaa can be any naturally occurring amino acid except Pro or Gly
  MISC_FEATURE (973)..(973): Xaa can be any naturally occurring amino acid except Pro or Gly
  MISC_FEATURE (974)..(974): Xaa can be any naturally occurring amino acid except Pro or Gly
  MISC_FEATURE (976)..(976): Xaa can be any naturally occurring amino acid
  MISC_FEATURE (977)..(977): Xaa can be any naturally occurring amino acid
  MISC_FEATURE (978)..(978): Xaa can be any naturally occurring amino acid
  MISC_FEATURE (980)..(980): Xaa can be any naturally occurring amino acid except Pro or Gly
  MISC_FEATURE (981)..(981): Xaa can be any naturally occurring amino acid except Pro or Gly
  MISC_FEATURE (982)..(982): Xaa can be any naturally occurring amino acid except Pro or Gly
  MISC_FEATURE (984)..(984): Xaa can be any naturally occurring amino acid
  MISC_FEATURE (985)..(985): Xaa can be any naturally occurring amino acid
  MISC_FEATURE (986)..(986): Xaa can be any naturally occurring amino acid
  MISC_FEATURE (988)..(988): Xaa can be any naturally occurring amino acid except Pro or Gly
  MISC_FEATURE (989)..(989): Xaa can be any naturally occurring amino acid except Pro or Gly
  MISC_FEATURE (990)..(990): Xaa can be any naturally occurring amino acid except Pro or Gly
  MISC_FEATURE (992)..(992): Xaa can be any naturally occurring amino acid
  MISC_FEATURE (993)..(993): Xaa can be any naturally occurring amino acid
  MISC_FEATURE (994)..(994): Xaa can be any naturally occurring amino acid
  MISC_FEATURE (996)..(996): Xaa can be any naturally occurring amino acid except Pro or Gly
  MISC_FEATURE (997)..(997): Xaa can be any naturally occurring amino acid except Pro or Gly
  MISC_FEATURE (998)..(998): Xaa can be any naturally occurring amino acid except Pro or Gly
  MISC_FEATURE (1000)..(1000): Xaa can be any naturally occurring amino acid
  MISC_FEATURE (1001)..(1001): Xaa can be any naturally occurring amino acid
  MISC_FEATURE (1002)..(1002): Xaa can be any naturally occurring amino acid
  MISC_FEATURE (1004)..(1004): Xaa can be any naturally occurring amino acid except Pro or Gly
  MISC_FEATURE (1005)..(1005): Xaa can be any naturally occurring amino acid except Pro or Gly
  MISC_FEATURE (1006)..(1006): Xaa can be any naturally occurring amino acid except Pro or Gly
  MISC_FEATURE (1008)..(1008): Xaa can be any naturally occurring amino acid
  MISC_FEATURE (1009)..(1009): Xaa can be any naturally occurring amino acid
  MISC_FEATURE (1010)..(1010): Xaa can be any naturally occurring amino acid
  MISC_FEATURE (1012)..(1012): Xaa can be any naturally occurring amino acid except Pro or Gly
  MISC_FEATURE (1013)..(1013): Xaa can be any naturally occurring amino acid except Pro or Gly
  MISC_FEATURE (1014)..(1014): Xaa can be any naturally occurring amino acid except Pro or Gly
  MISC_FEATURE (1016)..(1016): Xaa can be any naturally occurring amino acid
  MISC_FEATURE (1017)..(1017): Xaa can be any naturally occurring amino acid
  MISC_FEATURE (1018)..(1018): Xaa can be any naturally occurring amino acid
  MISC_FEATURE (1020)..(1020): Xaa can be any naturally occurring amino acid except Pro or Gly
  MISC_FEATURE (1021)..(1021): Xaa can be any naturally occurring amino acid except Pro or Gly
  MISC_FEATURE (1022)..(1022): Xaa can be any naturally occurring amino acid except Pro or Gly
  MISC_FEATURE (1024)..(1024): Xaa can be any naturally occurring amino acid
  MISC_FEATURE (1025)..(1025): Xaa can be any naturally occurring amino acid
  MISC_FEATURE (1026)..(1026): Xaa can be any naturally occurring amino acid
  MISC_FEATURE (1028)..(1028): Xaa can be any naturally occurring amino acid except Pro or Gly
  MISC_FEATURE (1029)..(1029): Xaa can be any naturally occurring amino acid except Pro or Gly
  MISC_FEATURE (1030)..(1030): Xaa can be any naturally occurring amino acid except Pro or Gly
  MISC_FEATURE (1032)..(1032): Xaa can be any naturally occurring amino acid
  MISC_FEATURE (1033)..(1033): Xaa can be any naturally occurring amino acid
  MISC_FEATURE (1034)..(1034): Xaa can be any naturally occurring amino acid
  MISC_FEATURE (1036)..(1036): Xaa can be any naturally occurring amino acid except Pro or Gly
  MISC_FEATURE (1037)..(1037): Xaa can be any naturally occurring amino acid except Pro or Gly
  MISC_FEATURE (1038)..(1038): Xaa can be any naturally occurring amino acid except Pro or Gly
  MISC_FEATURE (1040)..(1040): Xaa can be any naturally occurring amino acid
  MISC_FEATURE (1041)..(1041): Xaa can be any naturally occurring amino acid
  MISC_FEATURE (1042)..(1042): Xaa can be any naturally occurring amino acid
  MISC_FEATURE (1044)..(1044): Xaa can be any naturally occurring amino acid except Pro or Gly
  MISC_FEATURE (1045)..(1045): Xaa can be any naturally occurring amino acid except Pro or Gly
  MISC_FEATURE (1046)..(1046): Xaa can be any naturally occurring amino acid except Pro or Gly
  MISC_FEATURE (1048)..(1048): Xaa can be any naturally occurring amino acid
  MISC_FEATURE (1049)..(1049): Xaa can be any naturally occurring amino acid
  MISC_FEATURE (1050)..(1050): Xaa can be any naturally occurring amino acid
  MISC_FEATURE (1052)..(1052): Xaa can be any naturally occurring amino acid except Pro or Gly
  MISC_FEATURE (1053)..(1053): Xaa can be any naturally occurring amino acid except Pro or Gly
  MISC_FEATURE (1054)..(1054): Xaa can be any naturally occurring amino acid except Pro or Gly
  MISC_FEATURE (1056)..(1056): Xaa can be any naturally occurring amino acid
  MISC_FEATURE (1057)..(1057): Xaa can be any naturally occurring amino acid
  MISC_FEATURE (1058)..(1058): Xaa can be any naturally occurring amino acid
  MISC_FEATURE (1060)..(1060): Xaa can be any naturally occurring amino acid except Pro or Gly
  MISC_FEATURE (1061)..(1061): Xaa can be any naturally occurring amino acid except Pro or Gly
  MISC_FEATURE (1062)..(1062): Xaa can be any naturally occurring amino acid except Pro or Gly
  MISC_FEATURE (1064)..(1064): Xaa can be any naturally occurring amino acid
  MISC_FEATURE (1065)..(1065): Xaa can be any naturally occurring amino acid
  MISC_FEATURE (1066)..(1066): Xaa can be any naturally occurring amino acid
  MISC_FEATURE (1068)..(1068): Xaa can be any naturally occurring amino acid except Pro or Gly
  MISC_FEATURE (1069)..(1069): Xaa can be any naturally occurring amino acid except Pro or Gly
  MISC_FEATURE (1070)..(1070): Xaa can be any naturally occurring amino acid except Pro or Gly
  MISC_FEATURE (1072)..(1072): Xaa can be any naturally occurring amino acid
  MISC_FEATURE (1073)..(1073): Xaa can be any naturally occurring amino acid
  MISC_FEATURE (1074)..(1074): Xaa can be any naturally occurring amino acid
  MISC_FEATURE (1076)..(1076): Xaa can be any naturally occurring amino acid except Pro or Gly
  MISC_FEATURE (1077)..(1077): Xaa can be any naturally occurring amino acid except Pro or Gly
  MISC_FEATURE (1078)..(1078): Xaa can be any naturally occurring amino acid except Pro or Gly
  MISC_FEATURE (1080)..(1080): Xaa can be any naturally occurring amino acid
  MISC_FEATURE (1081)..(1081): Xaa can be any naturally occurring amino acid
  MISC_FEATURE (1082)..(1082): Xaa can be any naturally occurring amino acid
  MISC_FEATURE (1084)..(1084): Xaa can be any naturally occurring amino acid except Pro or Gly
  MISC_FEATURE (1085)..(1085): Xaa can be any naturally occurring amino acid except Pro or Gly
  MISC_FEATURE (1086)..(1086): Xaa can be any naturally occurring amino acid except Pro or Gly
  MISC_FEATURE (1088)..(1088): Xaa can be any naturally occurring amino acid
  MISC_FEATURE (1089)..(1089): Xaa can be any naturally occurring amino acid
  MISC_FEATURE (1090)..(1090): Xaa can be any naturally occurring amino acid
  MISC_FEATURE (1092)..(1092): Xaa can be any naturally occurring amino acid except Pro or Gly
  MISC_FEATURE (1093)..(1093): Xaa can be any naturally occurring amino acid except Pro or Gly
  MISC_FEATURE (1094)..(1094): Xaa can be any naturally occurring amino acid except Pro or Gly
  MISC_FEATURE (1096)..(1096): Xaa can be any naturally occurring amino acid
  MISC_FEATURE (1097)..(1097): Xaa can be any naturally occurring amino acid
  MISC_FEATURE (1098)..(1098): Xaa can be any naturally occurring amino acid
  MISC_FEATURE (1100)..(1100): Xaa can be any naturally occurring amino acid except Pro or Gly
  MISC_FEATURE (1101)..(1101): Xaa can be any naturally occurring amino acid except Pro or Gly
  MISC_FEATURE (1102)..(1102): Xaa can be any naturally occurring amino acid except Pro or Gly
  MISC_FEATURE (1104)..(1104): Xaa can be any naturally occurring amino acid
  MISC_FEATURE (1105)..(1105): Xaa can be any naturally occurring amino acid
  MISC_FEATURE (1106)..(1106): Xaa can be any naturally occurring amino acid
  MISC_FEATURE (1108)..(1108): Xaa can be any naturally occurring amino acid except Pro or Gly
  MISC_FEATURE (1109)..(1109): Xaa can be any naturally occurring amino acid except Pro or Gly
  MISC_FEATURE (1110)..(1110): Xaa can be any naturally occurring amino acid except Pro or Gly
  MISC_FEATURE (1112)..(1112): Xaa can be any naturally occurring amino acid
  MISC_FEATURE (1113)..(1113): Xaa can be any naturally occurring amino acid
  MISC_FEATURE (1114)..(1114): Xaa can be any naturally occurring amino acid
  MISC_FEATURE (1116)..(1116): Xaa can be any naturally occurring amino acid except Pro or Gly
  MISC_FEATURE (1117)..(1117): Xaa can be any naturally occurring amino acid except Pro or Gly
  MISC_FEATURE (1118)..(1118): Xaa can be any naturally occurring amino acid except Pro or Gly
  MISC_FEATURE (1120)..(1120): Xaa can be any naturally occurring amino acid
  MISC_FEATURE (1121)..(1121): Xaa can be any naturally occurring amino acid
  MISC_FEATURE (1122)..(1122): Xaa can be any naturally occurring amino acid
  MISC_FEATURE (1124)..(1124): Xaa can be any naturally occurring amino acid except Pro or Gly
  MISC_FEATURE (1125)..(1125): Xaa can be any naturally occurring amino acid except Pro or Gly
  MISC_FEATURE (1126)..(1126): Xaa can be any naturally occurring amino acid except Pro or Gly
  MISC_FEATURE (1128)..(1128): Xaa can be any naturally occurring amino acid
  MISC_FEATURE (1129)..(1129): Xaa can be any naturally occurring amino acid
  MISC_FEATURE (1130)..(1130): Xaa can be any naturally occurring amino acid
  MISC_FEATURE (1132)..(1132): Xaa can be any naturally occurring amino acid except Pro or Gly
  MISC_FEATURE (1133)..(1133): Xaa can be any naturally occurring amino acid except Pro or Gly
  MISC_FEATURE (1134)..(1134): Xaa can be any naturally occurring amino acid except Pro or Gly
  MISC_FEATURE (1136)..(1136): Xaa can be any naturally occurring amino acid
  MISC_FEATURE (1137)..(1137): Xaa can be any naturally occurring amino acid
  MISC_FEATURE (1138)..(1138): Xaa can be any naturally occurring amino acid
  MISC_FEATURE (1140)..(1140): Xaa can be any naturally occurring amino acid except Pro or Gly
  MISC_FEATURE (1141)..(1141): Xaa can be any naturally occurring amino acid except Pro or Gly
  MISC_FEATURE (1142)..(1142): Xaa can be any naturally occurring amino acid except Pro or Gly
  MISC_FEATURE (1144)..(1144): Xaa can be any naturally occurring amino acid
  MISC_FEATURE (1145)..(1145): Xaa can be any naturally occurring amino acid
  MISC_FEATURE (1146)..(1146): Xaa can be any naturally occurring amino acid
  MISC_FEATURE (1148)..(1148): Xaa can be any naturally occurring amino acid except Pro or Gly
  MISC_FEATURE (1149)..(1149): Xaa can be any naturally occurring amino acid except Pro or Gly
  MISC_FEATURE (1150)..(1150): Xaa can be any naturally occurring amino acid except Pro or Gly
  MISC_FEATURE (1152)..(1152): Xaa can be any naturally occurring amino acid
  MISC_FEATURE (1153)..(1153): Xaa can be any naturally occurring amino acid
  MISC_FEATURE (1154)..(1154): Xaa can be any naturally occurring amino acid
  MISC_FEATURE (1156)..(1156): Xaa can be any naturally occurring amino acid except Pro or Gly
  MISC_FEATURE (1157)..(1157): Xaa can be any naturally occurring amino acid except Pro or Gly
  MISC_FEATURE (1158)..(1158): Xaa can be any naturally occurring amino acid except Pro or Gly
  MISC_FEATURE (1160)..(1160): Xaa can be any naturally occurring amino acid
  MISC_FEATURE (1161)..(1161): Xaa can be any naturally occurring amino acid
  MISC_FEATURE (1162)..(1162): Xaa can be any naturally occurring amino acid
  MISC_FEATURE (1164)..(1164): Xaa can be any naturally occurring amino acid except Pro or Gly
  MISC_FEATURE (1165)..(1165): Xaa can be any naturally occurring amino acid except Pro or Gly
  MISC_FEATURE (1166)..(1166): Xaa can be any naturally occurring amino acid except Pro or Gly
  MISC_FEATURE (1168)..(1168): Xaa can be any naturally occurring amino acid
  MISC_FEATURE (1169)..(1169): Xaa can be any naturally occurring amino acid
  MISC_FEATURE (1170)..(1170): Xaa can be any naturally occurring amino acid
  MISC_FEATURE (1172)..(1172): Xaa can be any naturally occurring amino acid except Pro or Gly
  MISC_FEATURE (1173)..(1173): Xaa can be any naturally occurring amino acid except Pro or Gly
  MISC_FEATURE (1174)..(1174): Xaa can be any naturally occurring amino acid except Pro or Gly
  MISC_FEATURE (1176)..(1176): Xaa can be any naturally occurring amino acid
  MISC_FEATURE (1177)..(1177): Xaa can be any naturally occurring amino acid
  MISC_FEATURE (1178)..(1178): Xaa can be any naturally occurring amino acid
  MISC_FEATURE (1180)..(1180): Xaa can be any naturally occurring amino acid except Pro or Gly
  MISC_FEATURE (1181)..(1181): Xaa can be any naturally occurring amino acid except Pro or Gly
  MISC_FEATURE (1182)..(1182): Xaa can be any naturally occurring amino acid except Pro or Gly
  MISC_FEATURE (1184)..(1184): Xaa can be any naturally occurring amino acid
  MISC_FEATURE (1185)..(1185): Xaa can be any naturally occurring amino acid
  MISC_FEATURE (1186)..(1186): Xaa can be any naturally occurring amino acid
  MISC_FEATURE (1188)..(1188): Xaa can be any naturally occurring amino acid except Pro or Gly
  MISC_FEATURE (1189)..(1189): Xaa can be any naturally occurring amino acid except Pro or Gly
  MISC_FEATURE (1190)..(1190): Xaa can be any naturally occurring amino acid except Pro or Gly
  MISC_FEATURE (1192)..(1192): Xaa can be any naturally occurring amino acid
  MISC_FEATURE (1193)..(1193): Xaa can be any naturally occurring amino acid
  MISC_FEATURE (1194)..(1194): Xaa can be any naturally occurring amino acid
  MISC_FEATURE (1196)..(1196): Xaa can be any naturally occurring amino acid except Pro or Gly
  MISC_FEATURE (1197)..(1197): Xaa can be any naturally occurring amino acid except Pro or Gly
  MISC_FEATURE (1198)..(1198): Xaa can be any naturally occurring amino acid except Pro or Gly
  MISC_FEATURE (1200)..(1200): Xaa can be any naturally occurring amino acid
  MISC_FEATURE (1201)..(1201): Xaa can be any naturally occurring amino acid
  MISC_FEATURE (1202)..(1202): Xaa can be any naturally occurring amino acid
  MISC_FEATURE (1204)..(1204): Xaa can be any naturally occurring amino acid except Pro or Gly
  MISC_FEATURE (1205)..(1205): Xaa can be any naturally occurring amino acid except Pro or Gly
  MISC_FEATURE (1206)..(1206): Xaa can be any naturally occurring amino acid except Pro or Gly
  MISC_FEATURE (1208)..(1208): Xaa can be any naturally occurring amino acid
  MISC_FEATURE (1209)..(1209): Xaa can be any naturally occurring amino acid
  MISC_FEATURE (1210)..(1210): Xaa can be any naturally occurring amino acid
  MISC_FEATURE (1212)..(1212): Xaa can be any naturally occurring amino acid except Pro or Gly
  MISC_FEATURE (1213)..(1213): Xaa can be any naturally occurring amino acid except Pro or Gly
  MISC_FEATURE (1214)..(1214): Xaa can be any naturally occurring amino acid except Pro or Gly
  MISC_FEATURE (1216)..(1216): Xaa can be any naturally occurring amino acid
  MISC_FEATURE (1217)..(1217): Xaa can be any naturally occurring amino acid
  MISC_FEATURE (1218)..(1218): Xaa can be any naturally occurring amino acid
  MISC_FEATURE (1220)..(1220): Xaa can be any naturally occurring amino acid except Pro or Gly
  MISC_FEATURE (1221)..(1221): Xaa can be any naturally occurring amino acid except Pro or Gly
  MISC_FEATURE (1222)..(1222): Xaa can be any naturally occurring amino acid except Pro or Gly
  MISC_FEATURE (1224)..(1224): Xaa can be any naturally occurring amino acid
  MISC_FEATURE (1225)..(1225): Xaa can be any naturally occurring amino acid
  MISC_FEATURE (1226)..(1226): Xaa can be any naturally occurring amino acid
  MISC_FEATURE (1228)..(1228): Xaa can be any naturally occurring amino acid except Pro or Gly
  MISC_FEATURE (1229)..(1229): Xaa can be any naturally occurring amino acid except Pro or Gly
  MISC_FEATURE (1230)..(1230): Xaa can be any naturally occurring amino acid except Pro or Gly
  MISC_FEATURE (1232)..(1232): Xaa can be any naturally occurring amino acid
  MISC_FEATURE (1233)..(1233): Xaa can be any naturally occurring amino acid
  MISC_FEATURE (1234)..(1234): Xaa can be any naturally occurring amino acid
  MISC_FEATURE (1236)..(1236): Xaa can be any naturally occurring amino acid except Pro or Gly
  MISC_FEATURE (1237)..(1237): Xaa can be any naturally occurring amino acid except Pro or Gly
  MISC_FEATURE (1238)..(1238): Xaa can be any naturally occurring amino acid except Pro or Gly
  MISC_FEATURE (1240)..(1240): Xaa can be any naturally occurring amino acid
  MISC_FEATURE (1241)..(1241): Xaa can be any naturally occurring amino acid
  MISC_FEATURE (1242)..(1242): Xaa can be any naturally occurring amino acid
  MISC_FEATURE (1244)..(1244): Xaa can be any naturally occurring amino acid except Pro or Gly
  MISC_FEATURE (1245)..(1245): Xaa can be any naturally occurring amino acid except Pro or Gly
  MISC_FEATURE (1246)..(1246): Xaa can be any naturally occurring amino acid except Pro or Gly
  MISC_FEATURE (1248)..(1248): Xaa can be any naturally occurring amino acid
  MISC_FEATURE (1249)..(1249): Xaa can be any naturally occurring amino acid
  MISC_FEATURE (1250)..(1250): Xaa can be any naturally occurring amino acid
  MISC_FEATURE (1252)..(1252): Xaa can be any naturally occurring amino acid except Pro or Gly
  MISC_FEATURE (1253)..(1253): Xaa can be any naturally occurring amino acid except Pro or Gly
  MISC_FEATURE (1254)..(1254): Xaa can be any naturally occurring amino acid except Pro or Gly
  MISC_FEATURE (1256)..(1256): Xaa can be any naturally occurring amino acid
  MISC_FEATURE (1257)..(1257): Xaa can be any naturally occurring amino acid
  MISC_FEATURE (1258)..(1258): Xaa can be any naturally occurring amino acid
  MISC_FEATURE (1260)..(1260): Xaa can be any naturally occurring amino acid except Pro or Gly
  MISC_FEATURE (1261)..(1261): Xaa can be any naturally occurring amino acid except Pro or Gly
  MISC_FEATURE (1262)..(1262): Xaa can be any naturally occurring amino acid except Pro or Gly
  MISC_FEATURE (1264)..(1264): Xaa can be any naturally occurring amino acid
  MISC_FEATURE (1265)..(1265): Xaa can be any naturally occurring amino acid
  MISC_FEATURE (1266)..(1266): Xaa can be any naturally occurring amino acid
  MISC_FEATURE (1268)..(1268): Xaa can be any naturally occurring amino acid except Pro or Gly
  MISC_FEATURE (1269)..(1269): Xaa can be any naturally occurring amino acid except Pro or Gly
  MISC_FEATURE (1270)..(1270): Xaa can be any naturally occurring amino acid except Pro or Gly
  MISC_FEATURE (1272)..(1272): Xaa can be any naturally occurring amino acid
  MISC_FEATURE (1273)..(1273): Xaa can be any naturally occurring amino acid
  MISC_FEATURE (1274)..(1274): Xaa can be any naturally occurring amino acid
  MISC_FEATURE (1276)..(1276): Xaa can be any naturally occurring amino acid except Pro or Gly
  MISC_FEATURE (1277)..(1277): Xaa can be any naturally occurring amino acid except Pro or Gly
  MISC_FEATURE (1278)..(1278): Xaa can be any naturally occurring amino acid except Pro or Gly
  MISC_FEATURE (1280)..(1280): Xaa can be any naturally occurring amino acid
XXPXXXGXXXPXXXGXXXPXXXGXXXPXXXGXXXPXXXGXXXPXXXGXXXPXXXGXXXPXXXGXXXPXXXGXXXPXXXGXXXPXXXGXXXPXXXGXXXPXXXGXXXPXXXGXXXPXXXGXXXPXXXGXXXPXXXGXXXPXXXGXXXPXXXGXXXPXXXGXXXPXXXGXXXPXXXGXXXPXXXGXXXPXXXGXXXPXXXGXXXPXXXGXXXPXXXGXXXPXXXGXXXPXXXGXXXPXXXGXXXPXXXGXXXPXXXGXXXPXXXGXXXPXXXGXXXPXXXGXXXPXXXGXXXPXXXGXXXPXXXGXXXPXXXGXXXPXXXGXXXPXXXGXXXPXXXGXXXPXXXGXXXPXXXGXXXPXXXGXXXPXXXGXXXPXXXGXXXPXXXGXXXPXXXGXXXPXXXGXXXPXXXGXXXPXXXGXXXPXXXGXXXPXXXGXXXPXXXGXXXPXXXGXXXPXXXGXXXPXXXGXXXPXXXGXXXPXXXGXXXPXXXGXXXPXXXGXXXPXXXGXXXPXXXGXXXPXXXGXXXPXXXGXXXPXXXGXXXPXXXGXXXPXXXGXXXPXXXGXXXPXXXGXXXPXXXGXXXPXXXGXXXPXXXGXXXPXXXGXXXPXXXGXXXPXXXGXXXPXXXGXXXPXXXGXXXPXXXGXXXPXXXGXXXPXXXGXXXPXXXGXXXPXXXGXXXPXXXGXXXPXXXGXXXPXXXGXXXPXXXGXXXPXXXGXXXPXXXGXXXPXXXGXXXPXXXGXXXPXXXGXXXPXXXGXXXPXXXGXXXPXXXGXXXPXXXGXXXPXXXGXXXPXXXGXXXPXXXGXXXPXXXGXXXPXXXGXXXPXXXGXXXPXXXGXXXPXXXGXXXPXXXGXXXPXXXGXXXPXXXGXXXPXXXGXXXPXXXGXXXPXXXGXXXPXXXGXXXPXXXGXXXPXXXGXXXPXXXGXXXPXXXGXXXPXXXGXXXPXXXGXXXPXXXGXXXPXXXGXXXPXXXGXXXPXXXGXXXPXXXGXXXPXXXGXXXPXXXGXXXPXXXGXXXPXXXGXXXPXXXGXXXPXXXGXXXPXXXGXXXPXXXGXXXPXXXGXXXPXXXGXXXPXXXGXXXPXXXGXXXPXXXGXXXPXXXGXXXPXXXGXXXPXXXGXXXPXXXGXXXPXXXGXXXPXXXGXXXPXXXGXXXPXXXGXXXPXXXGXXXPXXXGXXXPXXXGXXXPXXXGXXXPXXXGXXXPXXXGXXXPXXXGXXXPXXXGXXXPXXXGXXXPXXXGXXXPXXXGXXXPXXXGXXXPXXXGXXXPXXXGXXXPXXXGXXXPXXXGX

SEQ ID NO: 152 - protein, 1280 aa, Artificial Sequence
  elastin-like polypeptide
  MISC_FEATURE (5)..(5): Xaa is Gln or Ser
  MISC_FEATURE (7)..(7): Xaa is Tyr or Val
  MISC_FEATURE (8)..(8): Xaa is Gln or Ser
  MISC_FEATURE (13)..(13): Xaa is Gln or Ser
  MISC_FEATURE (15)..(15): Xaa is Tyr or Val
  MISC_FEATURE (16)..(16): Xaa is Gln or Ser
  MISC_FEATURE (21)..(21): Xaa is Gln or Ser
  MISC_FEATURE (23)..(23): Xaa is Tyr or Val
  MISC_FEATURE (24)..(24): Xaa is Gln or Ser
  MISC_FEATURE (29)..(29): Xaa is Gln or Ser
  MISC_FEATURE (31)..(31): Xaa is Tyr or Val
  MISC_FEATURE (32)..(32): Xaa is Gln or Ser
  MISC_FEATURE (37)..(37): Xaa is Gln or Ser
  MISC_FEATURE (39)..(39): Xaa is Tyr or Val
  MISC_FEATURE (40)..(40): Xaa is Gln or Ser
  MISC_FEATURE (45)..(45): Xaa is Gln or Ser
  MISC_FEATURE (47)..(47): Xaa is Tyr or Val
  MISC_FEATURE (48)..(48): Xaa is Gln or Ser
  MISC_FEATURE (53)..(53): Xaa is Gln or Ser
  MISC_FEATURE (55)..(55): Xaa is Tyr or Val
  MISC_FEATURE (56)..(56): Xaa is Gln or Ser
  MISC_FEATURE (61)..(61): Xaa is Gln or Ser
  MISC_FEATURE (63)..(63): Xaa is Tyr or Val
  MISC_FEATURE (64)..(64): Xaa is Gln or Ser
  MISC_FEATURE (69)..(69): Xaa is Gln or Ser
  MISC_FEATURE (71)..(71): Xaa is Tyr or Val
  MISC_FEATURE (72)..(72): Xaa is Gln or Ser
  MISC_FEATURE (77)..(77): Xaa is Gln or Ser
  MISC_FEATURE (79)..(79): Xaa is Tyr or Val
  MISC_FEATURE (80)..(80): Xaa is Gln or Ser
  MISC_FEATURE (81)..(1280): May be present or absent in groups of the repeat unit Gly Arg Gly Asp Xaa Pro Xaa Xaa
  MISC_FEATURE (85)..(85): Xaa is Gln or Ser
  MISC_FEATURE (87)..(87): Xaa is Tyr or Val
  MISC_FEATURE (88)..(88): Xaa is Gln or Ser
  MISC_FEATURE (93)..(93): Xaa is Gln or Ser
  MISC_FEATURE (95)..(95): Xaa is Tyr or Val
  MISC_FEATURE (96)..(96): Xaa is Gln or Ser
  MISC_FEATURE (101)..(101): Xaa is Gln or Ser
  MISC_FEATURE (103)..(103): Xaa is Tyr or Val
  MISC_FEATURE (104)..(104): Xaa is Gln or Ser
  MISC_FEATURE (109)..(109): Xaa is Gln or Ser
  MISC_FEATURE (111)..(111): Xaa is Tyr or Val
  MISC_FEATURE (112)..(112): Xaa is Gln or Ser
  MISC_FEATURE (117)..(117): Xaa is Gln or Ser
  MISC_FEATURE (119)..(119): Xaa is Tyr or Val
  MISC_FEATURE (120)..(120): Xaa is Gln or Ser
  MISC_FEATURE (125)..(125): Xaa is Gln or Ser
  MISC_FEATURE (127)..(127): Xaa is Tyr or Val
  MISC_FEATURE (128)..(128): Xaa is Gln or Ser
  MISC_FEATURE (133)..(133): Xaa is Gln or Ser
  MISC_FEATURE (135)..(135): Xaa is Tyr or Val
  MISC_FEATURE (136)..(136): Xaa is Gln or Ser
  MISC_FEATURE (141)..(141): Xaa is Gln or Ser
  MISC_FEATURE (143)..(143): Xaa is Tyr or Val
  MISC_FEATURE (144)..(144): Xaa is Gln or Ser
  MISC_FEATURE (149)..(149): Xaa is Gln or Ser
  MISC_FEATURE (151)..(151): Xaa is Tyr or Val
  MISC_FEATURE (152)..(152): Xaa is Gln or Ser
  MISC_FEATURE (157)..(157): Xaa is Gln or Ser
  MISC_FEATURE (159)..(159): Xaa is Tyr or Val
  MISC_FEATURE (160)..(160): Xaa is Gln or Ser
  MISC_FEATURE (165)..(165): Xaa is Gln or Ser
  MISC_FEATURE (167)..(167): Xaa is Tyr or Val
  MISC_FEATURE (168)..(168): Xaa is Gln or Ser
  MISC_FEATURE (173)..(173): Xaa is Gln or Ser
  MISC_FEATURE (175)..(175): Xaa is Tyr or Val
  MISC_FEATURE (176)..(176): Xaa is Gln or Ser
  MISC_FEATURE (181)..(181): Xaa is Gln or Ser
  MISC_FEATURE (183)..(183): Xaa is Tyr or Val
  MISC_FEATURE (184)..(184): Xaa is Gln or Ser
  MISC_FEATURE (189)..(189): Xaa is Gln or Ser
  MISC_FEATURE (191)..(191): Xaa is Tyr or Val
  MISC_FEATURE (192)..(192): Xaa is Gln or Ser
  MISC_FEATURE (197)..(197): Xaa is Gln or Ser
  MISC_FEATURE (199)..(199): Xaa is Tyr or Val
  MISC_FEATURE (200)..(200): Xaa is Gln or Ser
  MISC_FEATURE (205)..(205): Xaa is Gln or Ser
  MISC_FEATURE (207)..(207): Xaa is Tyr or Val
  MISC_FEATURE (208)..(208): Xaa is Gln or Ser
  MISC_FEATURE (213)..(213): Xaa is Gln or Ser
  MISC_FEATURE (215)..(215): Xaa is Tyr or Val
  MISC_FEATURE (216)..(216): Xaa is Gln or Ser
  MISC_FEATURE (221)..(221): Xaa is Gln or Ser
  MISC_FEATURE (223)..(223): Xaa is Tyr or Val
  MISC_FEATURE (224)..(224): Xaa is Gln or Ser
  MISC_FEATURE (229)..(229): Xaa is Gln or Ser
  MISC_FEATURE (231)..(231): Xaa is Tyr or Val
  MISC_FEATURE (232)..(232): Xaa is Gln or Ser
  MISC_FEATURE (237)..(237): Xaa is Gln or Ser
  MISC_FEATURE (239)..(239): Xaa is Tyr or Val
  MISC_FEATURE (240)..(240): Xaa is Gln or Ser
  MISC_FEATURE (245)..(245): Xaa is Gln or Ser
  MISC_FEATURE (247)..(247): Xaa is Tyr or Val
  MISC_FEATURE (248)..(248): Xaa is Gln or Ser
  MISC_FEATURE (253)..(253): Xaa is Gln or Ser
  MISC_FEATURE (255)..(255): Xaa is Tyr or Val
  MISC_FEATURE (256)..(256): Xaa is Gln or Ser
  MISC_FEATURE (261)..(261): Xaa is Gln or Ser
  MISC_FEATURE (263)..(263): Xaa is Tyr or Val
  MISC_FEATURE (264)..(264): Xaa is Gln or Ser
  MISC_FEATURE (269)..(269): Xaa is Gln or Ser
  MISC_FEATURE (271)..(271): Xaa is Tyr or Val
  MISC_FEATURE (272)..(272): Xaa is Gln or Ser
  MISC_FEATURE (277)..(277): Xaa is Gln or Ser
  MISC_FEATURE (279)..(279): Xaa is Tyr or Val
  MISC_FEATURE (280)..(280): Xaa is Gln or Ser
  MISC_FEATURE (285)..(285): Xaa is Gln or Ser
  MISC_FEATURE (287)..(287): Xaa is Tyr or Val
  MISC_FEATURE (288)..(288): Xaa is Gln or Ser
  MISC_FEATURE (293)..(293): Xaa is Gln or Ser
  MISC_FEATURE (295)..(295): Xaa is Tyr or Val
  MISC_FEATURE (296)..(296): Xaa is Gln or Ser
  MISC_FEATURE (301)..(301): Xaa is Gln or Ser
  MISC_FEATURE (303)..(303): Xaa is Tyr or Val
  MISC_FEATURE (304)..(304): Xaa is Gln or Ser
  MISC_FEATURE (309)..(309): Xaa is Gln or Ser
  MISC_FEATURE (311)..(311): Xaa is Tyr or Val
  MISC_FEATURE (312)..(312): Xaa is Gln or Ser
  MISC_FEATURE (317)..(317): Xaa is Gln or Ser
  MISC_FEATURE (319)..(319): Xaa is Tyr or Val
  MISC_FEATURE (320)..(320): Xaa is Gln or Ser
  MISC_FEATURE (325)..(325): Xaa is Gln or Ser
  MISC_FEATURE (327)..(327): Xaa is Tyr or Val
  MISC_FEATURE (328)..(328): Xaa is Gln or Ser
  MISC_FEATURE (333)..(333): Xaa is Gln or Ser
  MISC_FEATURE (335)..(335): Xaa is Tyr or Val
  MISC_FEATURE (336)..(336): Xaa is Gln or Ser
  MISC_FEATURE (341)..(341): Xaa is Gln or Ser
  MISC_FEATURE (343)..(343): Xaa is Tyr or Val
  MISC_FEATURE (344)..(344): Xaa is Gln or Ser
  MISC_FEATURE (349)..(349): Xaa is Gln or Ser
  MISC_FEATURE (351)..(351): Xaa is Tyr or Val
  MISC_FEATURE (352)..(352): Xaa is Gln or Ser
  MISC_FEATURE (357)..(357): Xaa is Gln or Ser
  MISC_FEATURE (359)..(359): Xaa is Tyr or Val
  MISC_FEATURE (360)..(360): Xaa is Gln or Ser
  MISC_FEATURE (365)..(365): Xaa is Gln or Ser
  MISC_FEATURE (367)..(367): Xaa is Tyr or Val
  MISC_FEATURE (368)..(368): Xaa is Gln or Ser
  MISC_FEATURE (373)..(373): Xaa is Gln or Ser
  MISC_FEATURE (375)..(375): Xaa is Tyr or Val
  MISC_FEATURE (376)..(376): Xaa is Gln or Ser
  MISC_FEATURE (381)..(381): Xaa is Gln or Ser
  MISC_FEATURE (383)..(383): Xaa is Tyr or Val
  MISC_FEATURE (384)..(384): Xaa is Gln or Ser
  MISC_FEATURE (389)..(389): Xaa is Gln or Ser
  MISC_FEATURE (391)..(391): Xaa is Tyr or Val
  MISC_FEATURE (392)..(392): Xaa is Gln or Ser
  MISC_FEATURE (397)..(397): Xaa is Gln or Ser
  MISC_FEATURE (399)..(399): Xaa is Tyr or Val
  MISC_FEATURE (400)..(400): Xaa is Gln or Ser
  MISC_FEATURE (405)..(405): Xaa is Gln or Ser
  MISC_FEATURE (407)..(407): Xaa is Tyr or Val
  MISC_FEATURE (408)..(408): Xaa is Gln or Ser
  MISC_FEATURE (413)..(413): Xaa is Gln or Ser
  MISC_FEATURE (415)..(415): Xaa is Tyr or Val
  MISC_FEATURE (416)..(416): Xaa is Gln or Ser
  MISC_FEATURE (421)..(421): Xaa is Gln or Ser
  MISC_FEATURE (423)..(423): Xaa is Tyr or Val
  MISC_FEATURE (424)..(424): Xaa is Gln or Ser
  MISC_FEATURE (429)..(429): Xaa is Gln or Ser
  MISC_FEATURE (431)..(431): Xaa is Tyr or Val
  MISC_FEATURE (432)..(432): Xaa is Gln or Ser
  MISC_FEATURE (437)..(437): Xaa is Gln or Ser
  MISC_FEATURE (439)..(439): Xaa is Tyr or Val
  MISC_FEATURE (440)..(440): Xaa is Gln or Ser
  MISC_FEATURE (445)..(445): Xaa is Gln or Ser
  MISC_FEATURE (447)..(447): Xaa is Tyr or Val
  MISC_FEATURE (448)..(448): Xaa is Gln or Ser
  MISC_FEATURE (453)..(453): Xaa is Gln or Ser
  MISC_FEATURE (455)..(455): Xaa is Tyr or Val
  MISC_FEATURE (456)..(456): Xaa is Gln or Ser
  MISC_FEATURE (461)..(461): Xaa is Gln or Ser
  MISC_FEATURE (463)..(463): Xaa is Tyr or Val
  MISC_FEATURE (464)..(464): Xaa is Gln or Ser
  MISC_FEATURE (469)..(469): Xaa is Gln or Ser
  MISC_FEATURE (471)..(471): Xaa is Tyr or Val
  MISC_FEATURE (472)..(472): Xaa is Gln or Ser
  MISC_FEATURE (477)..(477): Xaa is Gln or Ser
  MISC_FEATURE (479)..(479): Xaa is Tyr or Val
  MISC_FEATURE (480)..(480): Xaa is Gln or Ser
  MISC_FEATURE (485)..(485): Xaa is Gln or Ser
  MISC_FEATURE (487)..(487): Xaa is Tyr or Val
  MISC_FEATURE (488)..(488): Xaa is Gln or Ser
  MISC_FEATURE (493)..(493): Xaa is Gln or Ser
  MISC_FEATURE (495)..(495): Xaa is Tyr or Val
  MISC_FEATURE (496)..(496): Xaa is Gln or Ser
  MISC_FEATURE (501)..(501): Xaa is Gln or Ser
  MISC_FEATURE (503)..(503): Xaa is Tyr or Val
  MISC_FEATURE (504)..(504): Xaa is Gln or Ser
  MISC_FEATURE (509)..(509): Xaa is Gln or Ser
  MISC_FEATURE (511)..(511): Xaa is Tyr or Val
  MISC_FEATURE (512)..(512): Xaa is Gln or Ser
  MISC_FEATURE (517)..(517): Xaa is Gln or Ser
  MISC_FEATURE (519)..(519): Xaa is Tyr or Val
  MISC_FEATURE (520)..(520): Xaa is Gln or Ser
  MISC_FEATURE (525)..(525): Xaa is Gln or Ser
  MISC_FEATURE (527)..(527): Xaa is Tyr or Val
  MISC_FEATURE (528)..(528): Xaa is Gln or Ser
  MISC_FEATURE (533)..(533): Xaa is Gln or Ser
  MISC_FEATURE (535)..(535): Xaa is Tyr or Val
  MISC_FEATURE (536)..(536): Xaa is Gln or Ser
  MISC_FEATURE (541)..(541): Xaa is Gln or Ser
  MISC_FEATURE (543)..(543): Xaa is Tyr or Val
  MISC_FEATURE (544)..(544): Xaa is Gln or Ser
  MISC_FEATURE (549)..(549): Xaa is Gln or Ser
  MISC_FEATURE (551)..(551): Xaa is Tyr or Val
  MISC_FEATURE (552)..(552): Xaa is Gln or Ser
  MISC_FEATURE (557)..(557): Xaa is Gln or Ser
  MISC_FEATURE (559)..(559): Xaa is Tyr or Val
  MISC_FEATURE (560)..(560): Xaa is Gln or Ser
  MISC_FEATURE (565)..(565): Xaa is Gln or Ser
  MISC_FEATURE (567)..(567): Xaa is Tyr or Val
  MISC_FEATURE (568)..(568): Xaa is Gln or Ser
  MISC_FEATURE (573)..(573): Xaa is Gln or Ser
  MISC_FEATURE (575)..(575): Xaa is Tyr or Val
  MISC_FEATURE (576)..(576): Xaa is Gln or Ser
  MISC_FEATURE (581)..(581): Xaa is Gln or Ser
  MISC_FEATURE (583)..(583): Xaa is Tyr or Val
  MISC_FEATURE (584)..(584): Xaa is Gln or Ser
  MISC_FEATURE (589)..(589): Xaa is Gln or Ser
  MISC_FEATURE (591)..(591): Xaa is Tyr or Val
  MISC_FEATURE (592)..(592): Xaa is Gln or Ser
  MISC_FEATURE (597)..(597): Xaa is Gln or Ser
  MISC_FEATURE (599)..(599): Xaa is Tyr or Val
  MISC_FEATURE (600)..(600): Xaa is Gln or Ser
  MISC_FEATURE (605)..(605): Xaa is Gln or Ser
  MISC_FEATURE (607)..(607): Xaa is Tyr or Val
  MISC_FEATURE (608)..(608): Xaa is Gln or Ser
  MISC_FEATURE (613)..(613): Xaa is Gln or Ser
  MISC_FEATURE (615)..(615): Xaa is Tyr or Val
  MISC_FEATURE (616)..(616): Xaa is Gln or Ser
  MISC_FEATURE (621)..(621): Xaa is Gln or Ser
  MISC_FEATURE (623)..(623): Xaa is Tyr or Val
  MISC_FEATURE (624)..(624): Xaa is Gln or Ser
  MISC_FEATURE (629)..(629): Xaa is Gln or Ser
  MISC_FEATURE (631)..(631): Xaa is Tyr or Val
  MISC_FEATURE (632)..(632): Xaa is Gln or Ser
  MISC_FEATURE (637)..(637): Xaa is Gln or Ser
  MISC_FEATURE (639)..(639): Xaa is Tyr or Val
  MISC_FEATURE (640)..(640): Xaa is Gln or Ser
  MISC_FEATURE (645)..(645): Xaa is Gln or Ser
  MISC_FEATURE (647)..(647): Xaa is Tyr or Val
  MISC_FEATURE (648)..(648): Xaa is Gln or Ser
  MISC_FEATURE (653)..(653): Xaa is Gln or Ser
  MISC_FEATURE (655)..(655): Xaa is Tyr or Val
  MISC_FEATURE (656)..(656): Xaa is Gln or Ser
  MISC_FEATURE (661)..(661): Xaa is Gln or Ser
  MISC_FEATURE (663)..(663): Xaa is Tyr or Val
  MISC_FEATURE (664)..(664): Xaa is Gln or Ser
  MISC_FEATURE (669)..(669): Xaa is Gln or Ser
  MISC_FEATURE (671)..(671): Xaa is Tyr or Val
  MISC_FEATURE (672)..(672): Xaa is Gln or Ser
  MISC_FEATURE (677)..(677): Xaa is Gln or Ser
  MISC_FEATURE (679)..(679): Xaa is Tyr or Val
  MISC_FEATURE (680)..(680): Xaa is Gln or Ser
  MISC_FEATURE (685)..(685): Xaa is Gln or Ser
  MISC_FEATURE (687)..(687): Xaa is Tyr or Val
  MISC_FEATURE (688)..(688): Xaa is Gln or Ser
  MISC_FEATURE (693)..(693): Xaa is Gln or Ser
  MISC_FEATURE (695)..(695): Xaa is Tyr or Val
  MISC_FEATURE (696)..(696): Xaa is Gln or Ser
  MISC_FEATURE (701)..(701): Xaa is Gln or Ser
  MISC_FEATURE (703)..(703): Xaa is Tyr or Val
  MISC_FEATURE (704)..(704): Xaa is Gln or Ser
  MISC_FEATURE (709)..(709): Xaa is Gln or Ser
  MISC_FEATURE (711)..(711): Xaa is Tyr or Val
  MISC_FEATURE (712)..(712): Xaa is Gln or Ser
  MISC_FEATURE (717)..(717): Xaa is Gln or Ser
  MISC_FEATURE (719)..(719): Xaa is Tyr or Val
  MISC_FEATURE (720)..(720): Xaa is Gln or Ser
  MISC_FEATURE (725)..(725): Xaa is Gln or Ser
  MISC_FEATURE (727)..(727): Xaa is Tyr or Val
  MISC_FEATURE (728)..(728): Xaa is Gln or Ser
  MISC_FEATURE (733)..(733): Xaa is Gln or Ser
  MISC_FEATURE (735)..(735): Xaa is Tyr or Val
  MISC_FEATURE (736)..(736): Xaa is Gln or Ser
  MISC_FEATURE (741)..(741): Xaa is Gln or Ser
  MISC_FEATURE (743)..(743): Xaa is Tyr or Val
  MISC_FEATURE (744)..(744): Xaa is Gln or Ser
  MISC_FEATURE (749)..(749): Xaa is Gln or Ser
  MISC_FEATURE (751)..(751): Xaa is Tyr or Val
  MISC_FEATURE (752)..(752): Xaa is Gln or Ser
  MISC_FEATURE (757)..(757): Xaa is Gln or Ser
  MISC_FEATURE (759)..(759): Xaa is Tyr or Val
  MISC_FEATURE (760)..(760): Xaa is Gln or Ser
  MISC_FEATURE (765)..(765): Xaa is Gln or Ser
  MISC_FEATURE (767)..(767): Xaa is Tyr or Val
  MISC_FEATURE (768)..(768): Xaa is Gln or Ser
  MISC_FEATURE (773)..(773): Xaa is Gln or Ser
  MISC_FEATURE (775)..(775): Xaa is Tyr or Val
  MISC_FEATURE (776)..(776): Xaa is Gln or Ser
  MISC_FEATURE (781)..(781): Xaa is Gln or Ser
  MISC_FEATURE (783)..(783): Xaa is Tyr or Val
  MISC_FEATURE (784)..(784): Xaa is Gln or Ser
  MISC_FEATURE (789)..(789): Xaa is Gln or Ser
  MISC_FEATURE (791)..(791): Xaa is Tyr or Val
  MISC_FEATURE (792)..(792): Xaa is Gln or Ser
  MISC_FEATURE (797)..(797): Xaa is Gln or Ser
  MISC_FEATURE (799)..(799): Xaa is Tyr or Val
  MISC_FEATURE (800)..(800): Xaa is Gln or Ser
  MISC_FEATURE (805)..(805): Xaa is Gln or Ser
  MISC_FEATURE (807)..(807): Xaa is Tyr or Val
  MISC_FEATURE (808)..(808): Xaa is Gln or Ser
  MISC_FEATURE (813)..(813): Xaa is Gln or Ser
  MISC_FEATURE (815)..(815): Xaa is Tyr or Val
  MISC_FEATURE (816)..(816): Xaa is Gln or Ser
  MISC_FEATURE (821)..(821): Xaa is Gln or Ser
  MISC_FEATURE (823)..(823): Xaa is Tyr or Val
  MISC_FEATURE (824)..(824): Xaa is Gln or Ser
  MISC_FEATURE (829)..(829): Xaa is Gln or Ser
  MISC_FEATURE (831)..(831): Xaa is Tyr or Val
  MISC_FEATURE (832)..(832): Xaa is Gln or Ser
  MISC_FEATURE (837)..(837): Xaa is Gln or Ser
  MISC_FEATURE (839)..(839): Xaa is Tyr or Val
  MISC_FEATURE (840)..(840): Xaa is Gln or Ser
  MISC_FEATURE (845)..(845): Xaa is Gln or Ser
  MISC_FEATURE (847)..(847): Xaa is Tyr or Val
  MISC_FEATURE (848)..(848): Xaa is Gln or Ser
  MISC_FEATURE (853)..(853): Xaa is Gln or Ser
  MISC_FEATURE (855)..(855): Xaa is Tyr or Val
  MISC_FEATURE (856)..(856): Xaa is Gln or Ser
  MISC_FEATURE (861)..(861): Xaa is Gln or Ser
  MISC_FEATURE (863)..(863): Xaa is Tyr or Val
  MISC_FEATURE (864)..(864): Xaa is Gln or Ser
  MISC_FEATURE (869)..(869): Xaa is Gln or Ser
  MISC_FEATURE (871)..(871): Xaa is Tyr or Val
  MISC_FEATURE (872)..(872): Xaa is Gln or Ser
  MISC_FEATURE (877)..(877): Xaa is Gln or Ser
  MISC_FEATURE (879)..(879): Xaa is Tyr or Val
  MISC_FEATURE (880)..(880): Xaa is Gln or Ser
  MISC_FEATURE (885)..(885): Xaa is Gln or Ser
  MISC_FEATURE (887)..(887): Xaa is Tyr or Val
  MISC_FEATURE (888)..(888): Xaa is Gln or Ser
  MISC_FEATURE (893)..(893): Xaa is Gln or Ser
  MISC_FEATURE (895)..(895): Xaa is Tyr or Val
  MISC_FEATURE (896)..(896): Xaa is Gln or Ser
  MISC_FEATURE (901)..(901): Xaa is Gln or Ser
  MISC_FEATURE (903)..(903): Xaa is Tyr or Val
  MISC_FEATURE (904)..(904): Xaa is Gln or Ser
  MISC_FEATURE (909)..(909): Xaa is Gln or Ser
  MISC_FEATURE (911)..(911): Xaa is Tyr or Val
  MISC_FEATURE (912)..(912): Xaa is Gln or Ser
  MISC_FEATURE (917)..(917): Xaa is Gln or Ser
  MISC_FEATURE (919)..(919): Xaa is Tyr or Val
  MISC_FEATURE (920)..(920): Xaa is Gln or Ser
  MISC_FEATURE (925)..(925): Xaa is Gln or Ser
  MISC_FEATURE (927)..(927): Xaa is Tyr or Val
  MISC_FEATURE (928)..(928): Xaa is Gln or Ser
  MISC_FEATURE (933)..(933): Xaa is Gln or Ser
  MISC_FEATURE (935)..(935): Xaa is Tyr or Val
  MISC_FEATURE (936)..(936): Xaa is Gln or Ser
  MISC_FEATURE (941)..(941): Xaa is Gln or Ser
  MISC_FEATURE (943)..(943): Xaa is Tyr or Val
  MISC_FEATURE (944)..(944): Xaa is Gln or Ser
  MISC_FEATURE (949)..(949): Xaa is Gln or Ser
  MISC_FEATURE (951)..(951): Xaa is Tyr or Val
  MISC_FEATURE (952)..(952): Xaa is Gln or Ser
  MISC_FEATURE (957)..(957): Xaa is Gln or Ser
  MISC_FEATURE (959)..(959): Xaa is Tyr or Val
  MISC_FEATURE (960)..(960): Xaa is Gln or Ser
  MISC_FEATURE (965)..(965): Xaa is Gln or Ser
  MISC_FEATURE (967)..(967): Xaa is Tyr or Val
  MISC_FEATURE (968)..(968): Xaa is Gln or Ser
  MISC_FEATURE (973)..(973): Xaa is Gln or Ser
  MISC_FEATURE (975)..(975): Xaa is Tyr or Val
  MISC_FEATURE (976)..(976): Xaa is Gln or Ser
  MISC_FEATURE (981)..(981): Xaa is Gln or Ser
  MISC_FEATURE (983)..(983): Xaa is Tyr or Val
  MISC_FEATURE (984)..(984): Xaa is Gln or Ser
  MISC_FEATURE (989)..(989): Xaa is Gln or Ser
  MISC_FEATURE (991)..(991): Xaa is Tyr or Val
  MISC_FEATURE (992)..(992): Xaa is Gln or Ser
  MISC_FEATURE (997)..(997): Xaa is Gln or Ser
  MISC_FEATURE (999)..(999): Xaa is Tyr or Val
  MISC_FEATURE (1000)..(1000): Xaa is Gln or Ser
  MISC_FEATURE (1005)..(1005): Xaa is Gln or Ser
  MISC_FEATURE (1007)..(1007): Xaa is Tyr or Val
  MISC_FEATURE (1008)..(1008): Xaa is Gln or Ser
  MISC_FEATURE (1013)..(1013): Xaa is Gln or Ser
  MISC_FEATURE (1015)..(1015): Xaa is Tyr or Val
  MISC_FEATURE (1016)..(1016): Xaa is Gln or Ser
  MISC_FEATURE (1021)..(1021): Xaa is Gln or Ser
  MISC_FEATURE (1023)..(1023): Xaa is Tyr or Val
  MISC_FEATURE (1024)..(1024): Xaa is Gln or Ser
  MISC_FEATURE (1029)..(1029): Xaa is Gln or Ser
  MISC_FEATURE (1031)..(1031): Xaa is Tyr or Val
  MISC_FEATURE (1032)..(1032): Xaa is Gln or Ser
  MISC_FEATURE (1037)..(1037): Xaa is Gln or Ser
  MISC_FEATURE (1039)..(1039): Xaa is Tyr or Val
  MISC_FEATURE (1040)..(1040): Xaa is Gln or Ser
  MISC_FEATURE (1045)..(1045): Xaa is Gln or Ser
  MISC_FEATURE (1047)..(1047): Xaa is Tyr or Val
  MISC_FEATURE (1048)..(1048): Xaa is Gln or Ser
  MISC_FEATURE (1053)..(1053): Xaa is Gln or Ser
  MISC_FEATURE (1055)..(1055): Xaa is Tyr or Val
  MISC_FEATURE (1056)..(1056): Xaa is Gln or Ser
  MISC_FEATURE (1061)..(1061): Xaa is Gln or Ser
  MISC_FEATURE (1063)..(1063): Xaa is Tyr or Val
  MISC_FEATURE (1064)..(1064): Xaa is Gln or Ser
  MISC_FEATURE (1069)..(1069): Xaa is Gln or Ser
  MISC_FEATURE (1071)..(1071): Xaa is Tyr or Val
  MISC_FEATURE (1072)..(1072): Xaa is Gln or Ser
  MISC_FEATURE (1077)..(1077): Xaa is Gln or Ser
  MISC_FEATURE (1079)..(1079): Xaa is Tyr or Val
  MISC_FEATURE (1080)..(1080): Xaa is Gln or Ser
  MISC_FEATURE (1085)..(1085): Xaa is Gln or Ser
  MISC_FEATURE (1087)..(1087): Xaa is Tyr or Val
  MISC_FEATURE (1088)..(1088): Xaa is Gln or Ser
  MISC_FEATURE (1093)..(1093): Xaa is Gln or Ser
  MISC_FEATURE (1095)..(1095): Xaa is Tyr or Val
  MISC_FEATURE (1096)..(1096): Xaa is Gln or Ser
  MISC_FEATURE (1101)..(1101): Xaa is Gln or Ser
  MISC_FEATURE (1103)..(1103): Xaa is Tyr or Val
  MISC_FEATURE (1104)..(1104): Xaa is Gln or Ser
  MISC_FEATURE (1109)..(1109): Xaa is Gln or Ser
  MISC_FEATURE (1111)..(1111): Xaa is Tyr or Val
  MISC_FEATURE (1112)..(1112): Xaa is Gln or Ser
  MISC_FEATURE (1117)..(1117): Xaa is Gln or Ser
  MISC_FEATURE (1119)..(1119): Xaa is Tyr or Val
  MISC_FEATURE (1120)..(1120): Xaa is Gln or Ser
  MISC_FEATURE (1125)..(1125): Xaa is Gln or Ser
  MISC_FEATURE (1127)..(1127): Xaa is Tyr or Val
  MISC_FEATURE (1128)..(1128): Xaa is Gln or Ser
  MISC_FEATURE (1133)..(1133): Xaa is Gln or Ser
  MISC_FEATURE (1135)..(1135): Xaa is Tyr or Val
  MISC_FEATURE (1136)..(1136): Xaa is Gln or Ser
  MISC_FEATURE (1141)..(1141): Xaa is Gln or Ser
  MISC_FEATURE (1143)..(1143): Xaa is Tyr or Val
  MISC_FEATURE (1144)..(1144): Xaa is Gln or Ser
  MISC_FEATURE (1149)..(1149): Xaa is Gln or Ser
  MISC_FEATURE (1151)..(1151): Xaa is Tyr or Val
  MISC_FEATURE (1152)..(1152): Xaa is Gln or Ser
  MISC_FEATURE (1157)..(1157): Xaa is Gln or Ser
  MISC_FEATURE (1159)..(1159): Xaa is Tyr or Val
  MISC_FEATURE (1160)..(1160): Xaa is Gln or Ser
  MISC_FEATURE (1165)..(1165): Xaa is Gln or Ser
  MISC_FEATURE (1167)..(1167): Xaa is Tyr or Val
  MISC_FEATURE (1168)..(1168): Xaa is Gln or Ser
  MISC_FEATURE (1173)..(1173): Xaa is Gln or Ser
  MISC_FEATURE (1175)..(1175): Xaa is Tyr or Val
  MISC_FEATURE (1176)..(1176): Xaa is Gln or Ser
  MISC_FEATURE (1181)..(1181): Xaa is Gln or Ser
  MISC_FEATURE (1183)..(1183): Xaa is Tyr or Val
  MISC_FEATURE (1184)..(1184): Xaa is Gln or Ser
  MISC_FEATURE (1189)..(1189): Xaa is Gln or Ser
  MISC_FEATURE (1191)..(1191): Xaa is Tyr or Val
  MISC_FEATURE (1192)..(1192): Xaa is Gln or Ser
  MISC_FEATURE (1197)..(1197): Xaa is Gln or Ser
  MISC_FEATURE (1199)..(1199): Xaa is Tyr or Val
  MISC_FEATURE (1200)..(1200): Xaa is Gln or Ser
  MISC_FEATURE (1205)..(1205): Xaa is Gln or Ser
  MISC_FEATURE (1207)..(1207): Xaa is Tyr or Val
  MISC_FEATURE (1208)..(1208): Xaa is Gln or Ser
  MISC_FEATURE (1213)..(1213): Xaa is Gln or Ser
  MISC_FEATURE (1215)..(1215): Xaa is Tyr or Val
  MISC_FEATURE (1216)..(1216): Xaa is Gln or Ser
  MISC_FEATURE (1221)..(1221): Xaa is Gln or Ser
  MISC_FEATURE (1223)..(1223): Xaa is Tyr or Val
  MISC_FEATURE (1224)..(1224): Xaa is Gln or Ser
  MISC_FEATURE (1229)..(1229): Xaa is Gln or Ser
  MISC_FEATURE (1231)..(1231): Xaa is Tyr or Val
  MISC_FEATURE (1232)..(1232): Xaa is Gln or Ser
  MISC_FEATURE (1237)..(1237): Xaa is Gln or Ser
  MISC_FEATURE (1239)..(1239): Xaa is Tyr or Val
  MISC_FEATURE (1240)..(1240): Xaa is Gln or Ser
  MISC_FEATURE (1245)..(1245): Xaa is Gln or Ser
  MISC_FEATURE (1247)..(1247): Xaa is Tyr or Val
  MISC_FEATURE (1248)..(1248): Xaa is Gln or Ser
  MISC_FEATURE (1253)..(1253): Xaa is Gln or Ser
  MISC_FEATURE (1255)..(1255): Xaa is Tyr or Val
  MISC_FEATURE (1256)..(1256): Xaa is Gln or Ser
  MISC_FEATURE (1261)..(1261): Xaa is Gln or Ser
  MISC_FEATURE (1263)..(1263): Xaa is Tyr or Val
  MISC_FEATURE (1264)..(1264): Xaa is Gln or Ser
  MISC_FEATURE (1269)..(1269): Xaa is Gln or Ser
  MISC_FEATURE (1271)..(1271): Xaa is Tyr or Val
  MISC_FEATURE (1272)..(1272): Xaa is Gln or Ser
  MISC_FEATURE (1277)..(1277): Xaa is Gln or Ser
  MISC_FEATURE (1279)..(1279): Xaa is Tyr or Val
  MISC_FEATURE (1280)..(1280): Xaa is Gln or Ser
GRGDXPXXGRGDXPXXGRGDXPXXGRGDXPXXGRGDXPXXGRGDXPXXGRGDXPXXGRGDXPXXGRGDXPXXGRGDXPXXGRGDXPXXGRGDXPXXGRGDXPXXGRGDXPXXGRGDXPXXGRGDXPXXGRGDXPXXGRGDXPXXGRGDXPXXGRGDXPXXGRGDXPXXGRGDXPXXGRGDXPXXGRGDXPXXGRGDXPXXGRGDXPXXGRGDXPXXGRGDXPXXGRGDXPXXGRGDXPXXGRGDXPXXGRGDXPXXGRGDXPXXGRGDXPXXGRGDXPXXGRGDXPXXGRGDXPXXGRGDXPXXGRGDXPXXGRGDXPXXGRGDXPXXGRGDXPXXGRGDXPXXGRGDXPXXGRGDXPXXGRGDXPXXGRGDXPXXGRGDXPXXGRGDXPXXGRGDXPXXGRGDXPXXGRGDXPXXGRGDXPXXGRGDXPXXGRGDXPXXGRGDXPXXGRGDXPXXGRGDXPXXGRGDXPXXGRGDXPXXGRGDXPXXGRGDXPXXGRGDXPXXGRGDXPXXGRGDXPXXGRGDXPXXGRGDXPXXGRGDXPXXGRGDXPXXGRGDXPXXGRGDXPXXGRGDXPXXGRGDXPXXGRGDXPXXGRGDXPXXGRGDXPXXGRGDXPXXGRGDXPXXGRGDXPXXGRGDXPXXGRGDXPXXGRGDXPXXGRGDXPXXGRGDXPXXGRGDXPXXGRGDXPXXGRGDXPXXGRGDXPXXGRGDXPXXGRGDXPXXGRGDXPXXGRGDXPXXGRGDXPXXGRGDXPXXGRGDXPXXGRGDXPXXGRGDXPXXGRGDXPXXGRGDXPXXGRGDXPXXGRGDXPXXGRGDXPXXGRGDXPXXGRGDXPXXGRGDXPXXGRGDXPXXGRGDXPXXGRGDXPXXGRGDXPXXGRGDXPXXGRGDXPXXGRGDXPXXGRGDXPXXGRGDXPXXGRGDXPXXGRGDXPXXGRGDXPXXGRGDXPXXGRGDXPXXGRGDXPXXGRGDXPXXGRGDXPXXGRGDXPXXGRGDXPXXGRGDXPXXGRGDXPXXGRGDXPXXGRGDXPXXGRGDXPXXGRGDXPXXGRGDXPXXGRGDXPXXGRGDXPXXGRGDXPXXGRGDXPXXGRGDXPXXGRGDXPXXGRGDXPXXGRGDXPXXGRGDXPXXGRGDXPXXGRGDXPXXGRGDXPXXGRGDXPXXGRGDXPXXGRGDXPXXGRGDXPXXGRGDXPXXGRGDXPXXGRGDXPXXGRGDXPXXGRGDXPXXGRGDXPXXGRGDXPXXGRGDXPXXGRGDXPXXGRGDXPXXGRGDXPXXGRGDXPXXGRGDXPXX

SEQ ID NO: 153 - protein, 1280 aa, Artificial Sequence
  elastin-like polypeptide
  MISC_FEATURE (1)..(1): Xaa is Gln or Ser
  MISC_FEATURE (2)..(2): Xaa is Tyr or Val
  MISC_FEATURE (4)..(4): Xaa is Gln or Ser
  MISC_FEATURE (9)..(9): Xaa is Gln or Ser
  MISC_FEATURE (10)..(10): Xaa is Tyr or Val
  MISC_FEATURE (12)..(12): Xaa is Gln or Ser
  MISC_FEATURE (17)..(17): Xaa is Gln or Ser
  MISC_FEATURE (18)..(18): Xaa is Tyr or Val
  MISC_FEATURE (20)..(20): Xaa is Gln or Ser
  MISC_FEATURE (25)..(25): Xaa is Gln or Ser
  MISC_FEATURE (26)..(26): Xaa is Tyr or Val
  MISC_FEATURE (28)..(28): Xaa is Gln or Ser
  MISC_FEATURE (33)..(33): Xaa is Gln or Ser
  MISC_FEATURE (34)..(34): Xaa is Tyr or Val
  MISC_FEATURE (36)..(36): Xaa is Gln or Ser
  MISC_FEATURE (41)..(41): Xaa is Gln or Ser
  MISC_FEATURE (42)..(42): Xaa is Tyr or Val
  MISC_FEATURE (44)..(44): Xaa is Gln or Ser
  MISC_FEATURE (49)..(49): Xaa is Gln or Ser
  MISC_FEATURE (50)..(50): Xaa is Tyr or Val
  MISC_FEATURE (52)..(52): Xaa is Gln or Ser
  MISC_FEATURE (57)..(57): Xaa is Gln or Ser
  MISC_FEATURE (58)..(58): Xaa is Tyr or Val
  MISC_FEATURE (60)..(60): Xaa is Gln or Ser
  MISC_FEATURE (65)..(65): Xaa is Gln or Ser
  MISC_FEATURE (66)..(66): Xaa is Tyr or Val
  MISC_FEATURE (68)..(68): Xaa is Gln or Ser
  MISC_FEATURE (73)..(73): Xaa is Gln or Ser
  MISC_FEATURE (74)..(74): Xaa is Tyr or Val
  MISC_FEATURE (76)..(76): Xaa is Gln or Ser
  MISC_FEATURE (81)..(1280): May be present or absent in groups of the repeat unit Xaa Xaa Pro Xaa Asp Gly Arg Gly
  MISC_FEATURE (81)..(81): Xaa is Gln or Ser
  MISC_FEATURE (82)..(82): Xaa is Tyr or Val
  MISC_FEATURE (84)..(84): Xaa is Gln or Ser
  MISC_FEATURE (89)..(89): Xaa is Gln or Ser
  MISC_FEATURE (90)..(90): Xaa is Tyr or Val
  MISC_FEATURE (92)..(92): Xaa is Gln or Ser
  MISC_FEATURE (97)..(97): Xaa is Gln or Ser
  MISC_FEATURE (98)..(98): Xaa is Tyr or Val
  MISC_FEATURE (100)..(100): Xaa is Gln or Ser
  MISC_FEATURE (105)..(105): Xaa is Gln or Ser
  MISC_FEATURE (106)..(106): Xaa is Tyr or Val
  MISC_FEATURE (108)..(108): Xaa is Gln or Ser
  MISC_FEATURE (113)..(113): Xaa is Gln or Ser
  MISC_FEATURE (114)..(114): Xaa is Tyr or Val
  MISC_FEATURE (116)..(116): Xaa is Gln or Ser
  MISC_FEATURE (121)..(121): Xaa is Gln or Ser
  MISC_FEATURE (122)..(122): Xaa is Tyr or Val
  MISC_FEATURE (124)..(124): Xaa is Gln or Ser
  MISC_FEATURE (129)..(129): Xaa is Gln or Ser
  MISC_FEATURE (130)..(130): Xaa is Tyr or Val
  MISC_FEATURE (132)..(132): Xaa is Gln or Ser
  MISC_FEATURE (137)..(137): Xaa is Gln or Ser
  MISC_FEATURE (138)..(138): Xaa is Tyr or Val
  MISC_FEATURE (140)..(140): Xaa is Gln or Ser
  MISC_FEATURE (145)..(145): Xaa is Gln or Ser
  MISC_FEATURE (146)..(146): Xaa is Tyr or Val
  MISC_FEATURE (148)..(148): Xaa is Gln or Ser
  MISC_FEATURE (153)..(153): Xaa is Gln or Ser
  MISC_FEATURE (154)..(154): Xaa is Tyr or Val
  MISC_FEATURE (156)..(156): Xaa is Gln or Ser
  MISC_FEATURE (161)..(161): Xaa is Gln or Ser
  MISC_FEATURE (162)..(162): Xaa is Tyr or Val
  MISC_FEATURE (164)..(164): Xaa is Gln or Ser
  MISC_FEATURE (169)..(169): Xaa is Gln or Ser
  MISC_FEATURE (170)..(170): Xaa is Tyr or Val
  MISC_FEATURE (172)..(172): Xaa is Gln or Ser
  MISC_FEATURE (177)..(177): Xaa is Gln or Ser
  MISC_FEATURE (178)..(178): Xaa is Tyr or Val
  MISC_FEATURE (180)..(180): Xaa is Gln or Ser
  MISC_FEATURE (185)..(185): Xaa is Gln or Ser
  MISC_FEATURE (186)..(186): Xaa is Tyr or Val
  MISC_FEATURE (188)..(188): Xaa is Gln or Ser
  MISC_FEATURE (193)..(193): Xaa is Gln or Ser
  MISC_FEATURE (194)..(194): Xaa is Tyr or Val
  MISC_FEATURE (196)..(196): Xaa is Gln or Ser
  MISC_FEATURE (201)..(201): Xaa is Gln or Ser
  MISC_FEATURE (202)..(202): Xaa is Tyr or Val
  MISC_FEATURE (204)..(204): Xaa is Gln or Ser
  MISC_FEATURE (209)..(209): Xaa is Gln or Ser
  MISC_FEATURE (210)..(210): Xaa is Tyr or Val
  MISC_FEATURE (212)..(212): Xaa is Gln or Ser
  MISC_FEATURE (217)..(217): Xaa is Gln or Ser
  MISC_FEATURE (218)..(218): Xaa is Tyr or Val
  MISC_FEATURE (220)..(220): Xaa is Gln or Ser
  MISC_FEATURE (225)..(225): Xaa is Gln or Ser
  MISC_FEATURE (226)..(226): Xaa is Tyr or Val
  MISC_FEATURE (228)..(228): Xaa is Gln or Ser
  MISC_FEATURE (233)..(233): Xaa is Gln or Ser
  MISC_FEATURE (234)..(234): Xaa is Tyr or Val
  MISC_FEATURE (236)..(236): Xaa is Gln or Ser
  MISC_FEATURE (241)..(241): Xaa is Gln or Ser
  MISC_FEATURE (242)..(242): Xaa is Tyr or Val
  MISC_FEATURE (244)..(244): Xaa is Gln or Ser
  MISC_FEATURE (249)..(249): Xaa is Gln or Ser
  MISC_FEATURE (250)..(250): Xaa is Tyr or Val
  MISC_FEATURE (252)..(252): Xaa is Gln or Ser
  MISC_FEATURE (257)..(257): Xaa is Gln or Ser
  MISC_FEATURE (258)..(258): Xaa is Tyr or Val
  MISC_FEATURE (260)..(260): Xaa is Gln or Ser
  MISC_FEATURE (265)..(265): Xaa is Gln or Ser
  MISC_FEATURE (266)..(266): Xaa is Tyr or Val
  MISC_FEATURE (268)..(268): Xaa is Gln or Ser
  MISC_FEATURE (273)..(273): Xaa is Gln or Ser
  MISC_FEATURE (274)..(274): Xaa is Tyr or Val
  MISC_FEATURE (276)..(276): Xaa is Gln or Ser
  MISC_FEATURE (281)..(281): Xaa is Gln or Ser
  MISC_FEATURE (282)..(282): Xaa is Tyr or Val
  MISC_FEATURE (284)..(284): Xaa is Gln or Ser
  MISC_FEATURE (289)..(289): Xaa is Gln or Ser
  MISC_FEATURE (290)..(290): Xaa is Tyr or Val
  MISC_FEATURE (292)..(292): Xaa is Gln or Ser
  MISC_FEATURE (297)..(297): Xaa is Gln or Ser
  MISC_FEATURE (298)..(298): Xaa is Tyr or Val
  MISC_FEATURE (300)..(300): Xaa is Gln or Ser
  MISC_FEATURE (305)..(305): Xaa is Gln or Ser
  MISC_FEATURE (306)..(306): Xaa is Tyr or Val
  MISC_FEATURE (308)..(308): Xaa is Gln or Ser
  MISC_FEATURE (313)..(313): Xaa is Gln or Ser
  MISC_FEATURE (314)..(314): Xaa is Tyr or Val
  MISC_FEATURE (316)..(316): Xaa is Gln or Ser
  MISC_FEATURE (321)..(321): Xaa is Gln or Ser
  MISC_FEATURE (322)..(322): Xaa is Tyr or Val
  MISC_FEATURE (324)..(324): Xaa is Gln or Ser
  MISC_FEATURE (329)..(329): Xaa is Gln or Ser
  MISC_FEATURE (330)..(330): Xaa is Tyr or Val
  MISC_FEATURE (332)..(332): Xaa is Gln or Ser
  MISC_FEATURE (337)..(337): Xaa is Gln or Ser
  MISC_FEATURE (338)..(338): Xaa is Tyr or Val
  MISC_FEATURE (340)..(340): Xaa is Gln or Ser
  MISC_FEATURE (345)..(345): Xaa is Gln or Ser
  MISC_FEATURE (346)..(346): Xaa is Tyr or Val
  MISC_FEATURE (348)..(348): Xaa is Gln or Ser
  MISC_FEATURE (353)..(353): Xaa is Gln or Ser
  MISC_FEATURE (354)..(354): Xaa is Tyr or Val
  MISC_FEATURE (356)..(356): Xaa is Gln or Ser
  MISC_FEATURE (361)..(361): Xaa is Gln or Ser
  MISC_FEATURE (362)..(362): Xaa is Tyr or Val
  MISC_FEATURE (364)..(364): Xaa is Gln or Ser
  MISC_FEATURE (369)..(369): Xaa is Gln or Ser
  MISC_FEATURE (370)..(370): Xaa is Tyr or Val
  MISC_FEATURE (372)..(372): Xaa is Gln or Ser
  MISC_FEATURE (377)..(377): Xaa is Gln or Ser
  MISC_FEATURE (378)..(378): Xaa is Tyr or Val
  MISC_FEATURE (380)..(380): Xaa is Gln or Ser
  MISC_FEATURE (385)..(385): Xaa is Gln or Ser
  MISC_FEATURE (386)..(386): Xaa is Tyr or Val
  MISC_FEATURE (388)..(388): Xaa is Gln or Ser
  MISC_FEATURE (393)..(393): Xaa is Gln or Ser
  MISC_FEATURE (394)..(394): Xaa is Tyr or Val
  MISC_FEATURE (396)..(396): Xaa is Gln or Ser
  MISC_FEATURE (401)..(401): Xaa is Gln or Ser
  MISC_FEATURE (402)..(402): Xaa is Tyr or Val
  MISC_FEATURE (404)..(404): Xaa is Gln or Ser
  MISC_FEATURE (409)..(409): Xaa is Gln or Ser
  MISC_FEATURE (410)..(410): Xaa is Tyr or Val
  MISC_FEATURE (412)..(412): Xaa is Gln or Ser
  MISC_FEATURE (417)..(417): Xaa is Gln or Ser
  MISC_FEATURE (418)..(418): Xaa is Tyr or Val
  MISC_FEATURE (420)..(420): Xaa is Gln or Ser
  MISC_FEATURE (425)..(425): Xaa is Gln or Ser
  MISC_FEATURE (426)..(426): Xaa is Tyr or Val
  MISC_FEATURE (428)..(428): Xaa is Gln or Ser
  MISC_FEATURE (433)..(433): Xaa is Gln or Ser
  MISC_FEATURE (434)..(434): Xaa is Tyr or Val
  MISC_FEATURE (436)..(436): Xaa is Gln or Ser
  MISC_FEATURE (441)..(441): Xaa is Gln or Ser
  MISC_FEATURE (442)..(442): Xaa is Tyr or Val
  MISC_FEATURE (444)..(444): Xaa is Gln or Ser
  MISC_FEATURE (449)..(449): Xaa is Gln or Ser
  MISC_FEATURE (450)..(450): Xaa is Tyr or Val
  MISC_FEATURE (452)..(452): Xaa is Gln or Ser
  MISC_FEATURE (457)..(457): Xaa is Gln or Ser
  MISC_FEATURE (458)..(458): Xaa is Tyr or Val
  MISC_FEATURE (460)..(460): Xaa is Gln or Ser
  MISC_FEATURE (465)..(465): Xaa is Gln or Ser
  MISC_FEATURE (466)..(466): Xaa is Tyr or Val
  MISC_FEATURE (468)..(468): Xaa is Gln or Ser
  MISC_FEATURE (473)..(473): Xaa is Gln or Ser
  MISC_FEATURE (474)..(474): Xaa is Tyr or Val
  MISC_FEATURE (476)..(476): Xaa is Gln or Ser
  MISC_FEATURE (481)..(481): Xaa is Gln or Ser
  MISC_FEATURE (482)..(482): Xaa is Tyr or Val
  MISC_FEATURE (484)..(484): Xaa is Gln or Ser
  MISC_FEATURE (489)..(489): Xaa is Gln or Ser
  MISC_FEATURE (490)..(490): Xaa is Tyr or Val
  MISC_FEATURE (492)..(492): Xaa is Gln or Ser
  MISC_FEATURE (497)..(497): Xaa is Gln or Ser
  MISC_FEATURE (498)..(498): Xaa is Tyr or Val
  MISC_FEATURE (500)..(500): Xaa is Gln or Ser
  MISC_FEATURE (505)..(505): Xaa is Gln or Ser
  MISC_FEATURE (506)..(506): Xaa is Tyr or Val
  MISC_FEATURE (508)..(508): Xaa is Gln or Ser
  MISC_FEATURE (513)..(513): Xaa is Gln or Ser
  MISC_FEATURE (514)..(514): Xaa is Tyr or Val
  MISC_FEATURE (516)..(516): Xaa is Gln or Ser
  MISC_FEATURE (521)..(521): Xaa is Gln or Ser
  MISC_FEATURE (522)..(522): Xaa is Tyr or Val
  MISC_FEATURE (524)..(524): Xaa is Gln or Ser
  MISC_FEATURE (529)..(529): Xaa is Gln or Ser
  MISC_FEATURE (530)..(530): Xaa is Tyr or Val
  MISC_FEATURE (532)..(532): Xaa is Gln or Ser
  MISC_FEATURE (537)..(537): Xaa is Gln or Ser
  MISC_FEATURE (538)..(538): Xaa is Tyr or Val
  MISC_FEATURE (540)..(540): Xaa is Gln or Ser
  MISC_FEATURE (545)..(545): Xaa is Gln or Ser
  MISC_FEATURE (546)..(546): Xaa is Tyr or Val
  MISC_FEATURE (548)..(548): Xaa is Gln or Ser
  MISC_FEATURE (553)..(553): Xaa is Gln or Ser
  MISC_FEATURE (554)..(554): Xaa is Tyr or Val
  MISC_FEATURE (556)..(556): Xaa is Gln or Ser
  MISC_FEATURE (561)..(561): Xaa is Gln or Ser
  MISC_FEATURE (562)..(562): Xaa is Tyr or Val
  MISC_FEATURE (564)..(564): Xaa is Gln or Ser
  MISC_FEATURE (569)..(569): Xaa is Gln or Ser
  MISC_FEATURE (570)..(570): Xaa is Tyr or Val
  MISC_FEATURE (572)..(572): Xaa is Gln or Ser
  MISC_FEATURE (577)..(577): Xaa is Gln or Ser
  MISC_FEATURE (578)..(578): Xaa is Tyr or Val
  MISC_FEATURE (580)..(580): Xaa is Gln or Ser
  MISC_FEATURE (585)..(585): Xaa is Gln or Ser
  MISC_FEATURE (586)..(586): Xaa is Tyr or Val
  MISC_FEATURE (588)..(588): Xaa is Gln or Ser
  MISC_FEATURE (593)..(593): Xaa is Gln or Ser
  MISC_FEATURE (594)..(594): Xaa is Tyr or Val
  MISC_FEATURE (596)..(596): Xaa is Gln or Ser
  MISC_FEATURE (601)..(601): Xaa is Gln or Ser
  MISC_FEATURE (602)..(602): Xaa is Tyr or Val
  MISC_FEATURE (604)..(604): Xaa is Gln or Ser
  MISC_FEATURE (609)..(609): Xaa is Gln or Ser
  MISC_FEATURE (610)..(610): Xaa is Tyr or Val
  MISC_FEATURE (612)..(612): Xaa is Gln or Ser
  MISC_FEATURE (617)..(617): Xaa is Gln or Ser
  MISC_FEATURE (618)..(618): Xaa is Tyr or Val
  MISC_FEATURE (620)..(620): Xaa is Gln or Ser
  MISC_FEATURE (625)..(625): Xaa is Gln or Ser
  MISC_FEATURE (626)..(626): Xaa is Tyr or Val
  MISC_FEATURE (628)..(628): Xaa is Gln or Ser
  MISC_FEATURE (633)..(633): Xaa is Gln or Ser
  MISC_FEATURE (634)..(634): Xaa is Tyr or Val
  MISC_FEATURE (636)..(636): Xaa is Gln or Ser
  MISC_FEATURE (641)..(641): Xaa is Gln or Ser
  MISC_FEATURE (642)..(642): Xaa is Tyr or Val
  MISC_FEATURE (644)..(644): Xaa is Gln or Ser
  MISC_FEATURE (649)..(649): Xaa is Gln or Ser
  MISC_FEATURE (650)..(650): Xaa is Tyr or Val
  MISC_FEATURE (652)..(652): Xaa is Gln or Ser
  MISC_FEATURE (657)..(657): Xaa is Gln or Ser
  MISC_FEATURE (658)..(658): Xaa is Tyr or Val
  MISC_FEATURE (660)..(660): Xaa is Gln or Ser
  MISC_FEATURE (665)..(665): Xaa is Gln or Ser
  MISC_FEATURE (666)..(666): Xaa is Tyr or Val
  MISC_FEATURE (668)..(668): Xaa is Gln or Ser
  MISC_FEATURE (673)..(673): Xaa is Gln or Ser
  MISC_FEATURE (674)..(674): Xaa is Tyr or Val
  MISC_FEATURE (676)..(676): Xaa is Gln or Ser
  MISC_FEATURE (681)..(681): Xaa is Gln or Ser
  MISC_FEATURE (682)..(682): Xaa is Tyr or Val
  MISC_FEATURE (684)..(684): Xaa is Gln or Ser
  MISC_FEATURE (689)..(689): Xaa is Gln or Ser
  MISC_FEATURE (690)..(690): Xaa is Tyr or Val
  MISC_FEATURE (692)..(692): Xaa is Gln or Ser
  MISC_FEATURE (697)..(697): Xaa is Gln or Ser
  MISC_FEATURE (698)..(698): Xaa is Tyr or Val
  MISC_FEATURE (700)..(700): Xaa is Gln or Ser
  MISC_FEATURE (705)..(705): Xaa is Gln or Ser
  MISC_FEATURE (706)..(706): Xaa is Tyr or Val
  MISC_FEATURE (708)..(708): Xaa is Gln or Ser
  MISC_FEATURE (713)..(713): Xaa is Gln or Ser
  MISC_FEATURE (714)..(714): Xaa is Tyr or Val
  MISC_FEATURE (716)..(716): Xaa is Gln or Ser
  MISC_FEATURE (721)..(721): Xaa is Gln or Ser
  MISC_FEATURE (722)..(722): Xaa is Tyr or Val
  MISC_FEATURE (724)..(724): Xaa is Gln or Ser
  MISC_FEATURE (729)..(729): Xaa is Gln or Ser
  MISC_FEATURE (730)..(730): Xaa is Tyr or Val
  MISC_FEATURE (732)..(732): Xaa is Gln or Ser
  MISC_FEATURE (737)..(737): Xaa is Gln or Ser
  MISC_FEATURE (738)..(738): Xaa is Tyr or Val
  MISC_FEATURE (740)..(740): Xaa is Gln or Ser
  MISC_FEATURE (745)..(745): Xaa is Gln or Ser
  MISC_FEATURE (746)..(746): Xaa is Tyr or Val
  MISC_FEATURE (748)..(748): Xaa is Gln or Ser
  MISC_FEATURE (753)..(753): Xaa is Gln or Ser
  MISC_FEATURE (754)..(754): Xaa is Tyr or Val
  MISC_FEATURE (756)..(756): Xaa is Gln or Ser
  MISC_FEATURE (761)..(761): Xaa is Gln or Ser
  MISC_FEATURE (762)..(762): Xaa is Tyr or Val
  MISC_FEATURE (764)..(764): Xaa is Gln or Ser
  MISC_FEATURE (769)..(769): Xaa is Gln or Ser
  MISC_FEATURE (770)..(770): Xaa is Tyr or Val
  MISC_FEATURE (772)..(772): Xaa is Gln or Ser
  MISC_FEATURE (777)..(777): Xaa is Gln or Ser
  MISC_FEATURE (778)..(778): Xaa is Tyr or Val
  MISC_FEATURE (780)..(780): Xaa is Gln or Ser
  MISC_FEATURE (785)..(785): Xaa is Gln or Ser
  MISC_FEATURE (786)..(786): Xaa is Tyr or Val
  MISC_FEATURE (788)..(788): Xaa is Gln or Ser
  MISC_FEATURE (793)..(793): Xaa is Gln or Ser
  MISC_FEATURE (794)..(794): Xaa is Tyr or Val
  MISC_FEATURE (796)..(796): Xaa is Gln or Ser
  MISC_FEATURE (801)..(801): Xaa is Gln or Ser
  MISC_FEATURE (802)..(802): Xaa is Tyr or Val
  MISC_FEATURE (804)..(804): Xaa is Gln or Ser
  MISC_FEATURE (809)..(809): Xaa is Gln or Ser
  MISC_FEATURE (810)..(810): Xaa is Tyr or Val
  MISC_FEATURE (812)..(812): Xaa is Gln or Ser
  MISC_FEATURE (817)..(817): Xaa is Gln or Ser
  MISC_FEATURE (818)..(818): Xaa is Tyr or Val
  MISC_FEATURE (820)..(820): Xaa is Gln or Ser
  MISC_FEATURE (825)..(825): Xaa is Gln or Ser
  MISC_FEATURE (826)..(826): Xaa is Tyr or Val
  MISC_FEATURE (828)..(828): Xaa is Gln or Ser
  MISC_FEATURE (833)..(833): Xaa is Gln or Ser
  MISC_FEATURE (834)..(834): Xaa is Tyr or Val
  MISC_FEATURE (836)..(836): Xaa is Gln or Ser
  MISC_FEATURE (841)..(841): Xaa is Gln or Ser
  MISC_FEATURE (842)..(842): Xaa is Tyr or Val
  MISC_FEATURE (844)..(844): Xaa is Gln or Ser
  MISC_FEATURE (849)..(849): Xaa is Gln or Ser
  MISC_FEATURE (850)..(850): Xaa is Tyr or Val
  MISC_FEATURE (852)..(852): Xaa is Gln or Ser
  MISC_FEATURE (857)..(857): Xaa is Gln or Ser
  MISC_FEATURE (858)..(858): Xaa is Tyr or Val
  MISC_FEATURE (860)..(860): Xaa is Gln or Ser
  MISC_FEATURE (865)..(865): Xaa is Gln or Ser
  MISC_FEATURE (866)..(866): Xaa is Tyr or Val
  MISC_FEATURE (868)..(868): Xaa is Gln or Ser
  MISC_FEATURE (873)..(873): Xaa is Gln or Ser
  MISC_FEATURE (874)..(874): Xaa is Tyr or Val
  MISC_FEATURE (876)..(876): Xaa is Gln or Ser
  MISC_FEATURE (881)..(881): Xaa is Gln or Ser
  MISC_FEATURE (882)..(882): Xaa is Tyr or Val
  MISC_FEATURE (884)..(884): Xaa is Gln or Ser
  MISC_FEATURE (889)..(889): Xaa is Gln or Ser
  MISC_FEATURE (890)..(890): Xaa is Tyr or Val
  MISC_FEATURE (892)..(892): Xaa is Gln or Ser
  MISC_FEATURE (897)..(897): Xaa is Gln or Ser
  MISC_FEATURE (898)..(898): Xaa is Tyr or Val
  MISC_FEATURE (900)..(900): Xaa is Gln or Ser
  MISC_FEATURE (905)..(905): Xaa is Gln or Ser
  MISC_FEATURE (906)..(906): Xaa is Tyr or Val
  MISC_FEATURE (908)..(908): Xaa is Gln or Ser
  MISC_FEATURE (913)..(913): Xaa is Gln or Ser
  MISC_FEATURE (914)..(914): Xaa is Tyr or Val
  MISC_FEATURE (916)..(916): Xaa is Gln or Ser
  MISC_FEATURE (921)..(921): Xaa is Gln or Ser
  MISC_FEATURE (922)..(922): Xaa is Tyr or Val
  MISC_FEATURE (924)..(924): Xaa is Gln or Ser
  MISC_FEATURE (929)..(929): Xaa is Gln or Ser
  MISC_FEATURE (930)..(930): Xaa is Tyr or Val
  MISC_FEATURE (932)..(932): Xaa is Gln or Ser
  MISC_FEATURE (937)..(937): Xaa is Gln or Ser
  MISC_FEATURE (938)..(938): Xaa is Tyr or Val
  MISC_FEATURE (940)..(940): Xaa is Gln or Ser
  MISC_FEATURE (945)..(945): Xaa is Gln or Ser
  MISC_FEATURE (946)..(946): Xaa is Tyr or Val
  MISC_FEATURE (948)..(948): Xaa is Gln or Ser
  MISC_FEATURE (953)..(953): Xaa is Gln or Ser
  MISC_FEATURE (954)..(954): Xaa is Tyr or Val
  MISC_FEATURE (956)..(956): Xaa is Gln or Ser
  MISC_FEATURE (961)..(961): Xaa is Gln or Ser
  MISC_FEATURE (962)..(962): Xaa is Tyr or Val
  MISC_FEATURE (964)..(964): Xaa is Gln or Ser
  MISC_FEATURE (969)..(969): Xaa is Gln or Ser
  MISC_FEATURE (970)..(970): Xaa is Tyr or Val
  MISC_FEATURE (972)..(972): Xaa is Gln or Ser
  MISC_FEATURE (977)..(977): Xaa is Gln or Ser
  MISC_FEATURE (978)..(978): Xaa is Tyr or Val
  MISC_FEATURE (980)..(980): Xaa is Gln or Ser
  MISC_FEATURE (985)..(985): Xaa is Gln or Ser
  MISC_FEATURE (986)..(986): Xaa is Tyr or Val
  MISC_FEATURE (988)..(988): Xaa is Gln or Ser
  MISC_FEATURE (993)..(993): Xaa is Gln or Ser
  MISC_FEATURE (994)..(994): Xaa is Tyr or Val
  MISC_FEATURE (996)..(996): Xaa is Gln or Ser
  MISC_FEATURE (1001)..(1001): Xaa is Gln or Ser
  MISC_FEATURE (1002)..(1002): Xaa is Tyr or Val
  MISC_FEATURE (1004)..(1004): Xaa is Gln or Ser
  MISC_FEATURE (1009)..(1009): Xaa is Gln or Ser
  MISC_FEATURE (1010)..(1010): Xaa is Tyr or Val
  MISC_FEATURE (1012)..(1012): Xaa is Gln or Ser
  MISC_FEATURE (1017)..(1017): Xaa is Gln or Ser
  MISC_FEATURE (1018)..(1018): Xaa is Tyr or Val
  MISC_FEATURE (1020)..(1020): Xaa is Gln or Ser
  MISC_FEATURE (1025)..(1025): Xaa is Gln or Ser
  MISC_FEATURE (1026)..(1026): Xaa is Tyr or Val
  MISC_FEATURE (1028)..(1028): Xaa is Gln or Ser
  MISC_FEATURE (1033)..(1033): Xaa is Gln or Ser
  MISC_FEATURE (1034)..(1034): Xaa is Tyr or Val
  MISC_FEATURE (1036)..(1036): Xaa is Gln or Ser
  MISC_FEATURE (1041)..(1041): Xaa is Gln or Ser
  MISC_FEATURE (1042)..(1042): Xaa is Tyr or Val
  MISC_FEATURE (1044)..(1044): Xaa is Gln or Ser
  MISC_FEATURE (1049)..(1049): Xaa is Gln or Ser
  MISC_FEATURE (1050)..(1050): Xaa is Tyr or Val
  MISC_FEATURE (1052)..(1052): Xaa is Gln or Ser
  MISC_FEATURE (1057)..(1057): Xaa is Gln or Ser
  MISC_FEATURE (1058)..(1058): Xaa is Tyr or Val
  MISC_FEATURE (1060)..(1060): Xaa is Gln or Ser
  MISC_FEATURE (1065)..(1065): Xaa is Gln or Ser
  MISC_FEATURE (1066)..(1066): Xaa is Tyr or Val
  MISC_FEATURE (1068)..(1068): Xaa is Gln or Ser
  MISC_FEATURE (1073)..(1073): Xaa is Gln or Ser
  MISC_FEATURE (1074)..(1074): Xaa is Tyr or Val
  MISC_FEATURE (1076)..(1076): Xaa is Gln or Ser
  MISC_FEATURE (1081)..(1081): Xaa is Gln or Ser
  MISC_FEATURE (1082)..(1082): Xaa is Tyr or Val
  MISC_FEATURE (1084)..(1084): Xaa is Gln or Ser
  MISC_FEATURE (1089)..(1089): Xaa is Gln or Ser
  MISC_FEATURE (1090)..(1090): Xaa is Tyr or Val
  MISC_FEATURE (1092)..(1092): Xaa is Gln or Ser
  MISC_FEATURE (1097)..(1097): Xaa is Gln or Ser
  MISC_FEATURE (1098)..(1098): Xaa is Tyr or Val
  MISC_FEATURE (1100)..(1100): Xaa is Gln or Ser
  MISC_FEATURE (1105)..(1105): Xaa is Gln or Ser
  MISC_FEATURE (1106)..(1106): Xaa is Tyr or Val
  MISC_FEATURE (1108)..(1108): Xaa is Gln or Ser
  MISC_FEATURE (1113)..(1113): Xaa is Gln or Ser
  MISC_FEATURE (1114)..(1114): Xaa is Tyr or Val
  MISC_FEATURE (1116)..(1116): Xaa is Gln or Ser
  MISC_FEATURE (1121)..(1121): Xaa is Gln or Ser
  MISC_FEATURE (1122)..(1122): Xaa is Tyr or Val
  MISC_FEATURE (1124)..(1124): Xaa is Gln or Ser
  MISC_FEATURE (1129)..(1129): Xaa is Gln or Ser
  MISC_FEATURE (1130)..(1130): Xaa is Tyr or Val
  MISC_FEATURE (1132)..(1132): Xaa is Gln or Ser
  MISC_FEATURE (1137)..(1137): Xaa is Gln or Ser
  MISC_FEATURE (1138)..(1138): Xaa is Tyr or Val
  MISC_FEATURE (1140)..(1140): Xaa is Gln or Ser
  MISC_FEATURE (1145)..(1145): Xaa is Gln or Ser
  MISC_FEATURE (1146)..(1146): Xaa is Tyr or Val
  MISC_FEATURE (1148)..(1148): Xaa is Gln or Ser
  MISC_FEATURE (1153)..(1153): Xaa is Gln or Ser
  MISC_FEATURE (1154)..(1154): Xaa is Tyr or Val
  MISC_FEATURE (1156)..(1156): Xaa is Gln or Ser
  MISC_FEATURE (1161)..(1161): Xaa is Gln or Ser
  MISC_FEATURE (1162)..(1162): Xaa is Tyr or Val
  MISC_FEATURE (1164)..(1164): Xaa is Gln or Ser
  MISC_FEATURE (1169)..(1169): Xaa is Gln or Ser
  MISC_FEATURE (1170)..(1170): Xaa is Tyr or Val
  MISC_FEATURE (1172)..(1172): Xaa is Gln or Ser
  MISC_FEATURE (1177)..(1177): Xaa is Gln or Ser
  MISC_FEATURE (1178)..(1178): Xaa is Tyr or Val
  MISC_FEATURE (1180)..(1180): Xaa is Gln or Ser
  MISC_FEATURE (1185)..(1185): Xaa is Gln or Ser
  MISC_FEATURE (1186)..(1186): Xaa is Tyr or Val
  MISC_FEATURE (1188)..(1188): Xaa is Gln or Ser
  MISC_FEATURE (1193)..(1193): Xaa is Gln or Ser
  MISC_FEATURE (1194)..(1194): Xaa is Tyr or Val
  MISC_FEATURE (1196)..(1196): Xaa is Gln or Ser
  MISC_FEATURE (1201)..(1201): Xaa is Gln or Ser
  MISC_FEATURE (1202)..(1202): Xaa is Tyr or Val
  MISC_FEATURE (1204)..(1204): Xaa is Gln or Ser
  MISC_FEATURE (1209)..(1209): Xaa is Gln or Ser
  MISC_FEATURE (1210)..(1210): Xaa is Tyr or Val
  MISC_FEATURE (1212)..(1212): Xaa is Gln or Ser
  MISC_FEATURE (1217)..(1217): Xaa is Gln or Ser
  MISC_FEATURE (1218)..(1218): Xaa is Tyr or Val
  MISC_FEATURE (1220)..(1220): Xaa is Gln or Ser
  MISC_FEATURE (1225)..(1225): Xaa is Gln or Ser
  MISC_FEATURE (1226)..(1226): Xaa is Tyr or Val
  MISC_FEATURE (1228)..(1228): Xaa is Gln or Ser
  MISC_FEATURE (1233)..(1233): Xaa is Gln or Ser
  MISC_FEATURE (1234)..(1234): Xaa is Tyr or Val
  MISC_FEATURE (1236)..(1236): Xaa is Gln or Ser
  MISC_FEATURE (1241)..(1241): Xaa is Gln or Ser
  MISC_FEATURE (1242)..(1242): Xaa is Tyr or Val
  MISC_FEATURE (1244)..(1244): Xaa is Gln or Ser
  MISC_FEATURE (1249)..(1249): Xaa is Gln or Ser
  MISC_FEATURE (1250)..(1250): Xaa is Tyr or Val
  MISC_FEATURE (1252)..(1252): Xaa is Gln or Ser
  MISC_FEATURE (1257)..(1257): Xaa is Gln or Ser
  MISC_FEATURE (1258)..(1258): Xaa is Tyr or Val
  MISC_FEATURE (1260)..(1260): Xaa is Gln or Ser
  MISC_FEATURE (1265)..(1265): Xaa is Gln or Ser
  MISC_FEATURE (1266)..(1266): Xaa is Tyr or Val
  MISC_FEATURE (1268)..(1268): Xaa is Gln or Ser
  MISC_FEATURE (1273)..(1273): Xaa is Gln or Ser
  MISC_FEATURE (1274)..(1274): Xaa is Tyr or Val
  MISC_FEATURE (1276)..(1276): Xaa is Gln or Ser
XXPXDGRGXXPXDGRGXXPXDGRGXXPXDGRGXXPXDGRGXXPXDGRGXXPXDGRGXXPXDGRGXXPXDGRGXXPXDGRGXXPXDGRGXXPXDGRGXXPXDGRGXXPXDGRGXXPXDGRGXXPXDGRGXXPXDGRGXXPXDGRGXXPXDGRGXXPXDGRGXXPXDGRGXXPXDGRGXXPXDGRGXXPXDGRGXXPXDGRGXXPXDGRGXXPXDGRGXXPXDGRGXXPXDGRGXXPXDGRGXXPXDGRGXXPXDGRGXXPXDGRGXXPXDGRGXXPXDGRGXXPXDGRGXXPXDGRGXXPXDGRGXXPXDGRGXXPXDGRGXXPXDGRGXXPXDGRGXXPXDGRGXXPXDGRGXXPXDGRGXXPXDGRGXXPXDGRGXXPXDGRGXXPXDGRGXXPXDGRGXXPXDGRGXXPXDGRGXXPXDGRGXXPXDGRGXXPXDGRGXXPXDGRGXXPXDGRGXXPXDGRGXXPXDGRGXXPXDGRGXXPXDGRGXXPXDGRGXXPXDGRGXXPXDGRGXXPXDGRGXXPXDGRGXXPXDGRGXXPXDGRGXXPXDGRGXXPXDGRGXXPXDGRGXXPXDGRGXXPXDGRGXXPXDGRGXXPXDGRGXXPXDGRGXXPXDGRGXXPXDGRGXXPXDGRGXXPXDGRGXXPXDGRGXXPXDGRGXXPXDGRGXXPXDGRGXXPXDGRGXXPXDGRGXXPXDGRGXXPXDGRGXXPXDGRGXXPXDGRGXXPXDGRGXXPXDGRGXXPXDGRGXXPXDGRGXXPXDGRGXXPXDGRGXXPXDGRGXXPXDGRGXXPXDGRGXXPXDGRGXXPXDGRGXXPXDGRGXXPXDGRGXXPXDGRGXXPXDGRGXXPXDGRGXXPXDGRGXXPXDGRGXXPXDGRGXXPXDGRGXXPXDGRGXXPXDGRGXXPXDGRGXXPXDGRGXXPXDGRGXXPXDGRGXXPXDGRGXXPXDGRGXXPXDGRGXXPXDGRGXXPXDGRGXXPXDGRGXXPXDGRGXXPXDGRGXXPXDGRGXXPXDGRGXXPXDGRGXXPXDGRGXXPXDGRGXXPXDGRGXXPXDGRGXXPXDGRGXXPXDGRGXXPXDGRGXXPXDGRGXXPXDGRGXXPXDGRGXXPXDGRGXXPXDGRGXXPXDGRGXXPXDGRGXXPXDGRGXXPXDGRGXXPXDGRGXXPXDGRGXXPXDGRGXXPXDGRGXXPXDGRGXXPXDGRGXXPXDGRGXXPXDGRGXXPXDGRGXXPXDGRGXXPXDGRGXXPXDGRGXXPXDGRGXXPXDGRGXXPXDGRGXXPXDGRGXXPXDGRG

SEQ ID NO: 154 - protein, 593 aa, Unknown
  Streptococcus sp. group G
MEKEKKVKYFLRKSAFGLASVSAAFLVGSTVFAVDSPIEDTPIIRNGGELTNLLGNSETTLALRNEESATADLTAAAVADTVAAAAAENAGAAAWEAAAAADALAKAKADALKEFNKYGVSDYYKNLINNAKTVEGVKDLQAQVVESAKKARISEATDGLSDFLKSQTPAEDTVKSIELAEAKVLANRELDKYGVSDYHKNLINNAKTVEGVKDLQAQVVESAKKARISEATDGLSDFLKSQTPAEDTVKSIELAEAKVLANRELDKYGVSDYYKNLINNAKTVEGVKALIDEILAALPKTDTYKLILNGKTLKGETTTEAVDAATAEKVFKQYANDNGVDGEWTYDDATKTFTVTEKPEVIDASELTPAVTTYKLVINGKTLKGETTTEAVDAATAEKVFKQYANDNGVDGEWTYDDATKTFTVTEKPEVIDASELTPAVTTYKLVINGKTLKGETTTKAVDAETAEKAFKQYANDNGVDGVWTYDDATKTFTVTEMVTEVPGDAPTEPEKPEASIPLVPLTPATPIAKDDAKKDDTKKEDAKKPEAKKEDAKKAETLPTTGEGSNPFFTAAALAVMAGAGALAVASKRKED

SEQ ID NO: 155 - protein, 530 aa, Unknown
  Streptococcus sp. group G
MVDSPIEDTPIIRNGGELTNLLGNSETTLALRNEESATADLTAAAVADTVAAAAAENAGAAAWEAAAAADALAKAKADALKEFNKYGVSDYYKNLINNAKTVEGVKDLQAQVVESAKKARISEATDGLSDFLKSQTPAEDTVKSIELAEAKVLANRELDKYGVSDYHKNLINNAKTVEGVKDLQAQVVESAKKARISEATDGLSDFLKSQTPAEDTVKSIELAEAKVLANRELDKYGVSDYYKNLINNAKTVEGVKALIDEILAALPKTDTYKLILNGKTLKGETTTEAVDAATAEKVFKQYANDNGVDGEWTYDDATKTFTVTEKPEVIDASELTPAVTTYKLVINGKTLKGETTTEAVDAATAEKVFKQYANDNGVDGEWTYDDATKTFTVTEKPEVIDASELTPAVTTYKLVINGKTLKGETTTKAVDAETAEKAFKQYANDNGVDGVWTYDDATKTFTVTEMVTEVPGDAPTEPEKPEASIPLVPLTPATPIAKDDAKKDDTKKEDAKKPEAKKEDAKKAETLPTT

SEQ ID NO: 156 - protein, 72 aa, Unknown
  Streptococcus sp. group G
TYKLILNGKTLKGETTTEAVDAATAEKVFKQYANDNGVDGEWTYDDATKTFTVTEKPEVIDASELTPAVTTY

SEQ ID NO: 157 - protein, 12 aa, Artificial Sequence
  linker
GKSSGSGSESKS

SEQ ID NO: 158 - protein, 14 aa, Artificial Sequence
  linker
GSTSGSGKSSEGKG

SEQ ID NO: 159 - protein, 18 aa, Artificial Sequence
  linker
GSTSGSGKSSEGSGSTKG

SEQ ID NO: 160 - protein, 18 aa, Artificial Sequence
  linker
GSTSGSGKPGSGEGSTKG

SEQ ID NO: 161 - protein, 14 aa, Artificial Sequence
  linker
EGKSSGSGSESKEF

SEQ ID NO: 162 - protein, 5 aa, Artificial Sequence
  linker
SRSSG

SEQ ID NO: 163 - protein, 5 aa, Artificial Sequence
  linker
SGSSC

SEQ ID NO: 164 - protein, 18 aa, Artificial Sequence
  linker
EGRGSLLTCGDVEENPGP

SEQ ID NO: 165 - protein, 19 aa, Artificial Sequence
  linker
ATNFSLLKQAGDVEENPGP

SEQ ID NO: 166 - protein, 20 aa, Artificial Sequence
  linker
QCTNYALLKLAGDVESNPGP

SEQ ID NO: 167 - protein, 22 aa, Artificial Sequence
  linker
VKQTLNFDLLKLAGDVESNPGP

SEQ ID NO: 168 - protein, 3 aa, Artificial Sequence
  linker
GSG

SEQ ID NO: 169 - protein, 494 aa, Homo Sapiens
MSTTLLSAFYDVDFLCKTEKSLANLNLNNMLDKKAVGTPVAAAPSSGFAPGFLRRHSASNLHALAHPAPSPGSCSPKFPGAANGSSCGSAAAGGPTSYGTLKEPSGGGGTALLNKENKFRDRSFSENGDRSQHLLHLQQQQKGGGGSQINSTRYKTELCRPFEESGTCKYGEKCQFAHGFHELRSLTRHPKYKTELCRTFHTIGFCPYGPRCHFIHNADERRPAPSGGASGDLRAFGTRDALHLGFPREPRPKLHHSLSFSGFPSGHHQPPGGLESPLLLDSPTSRTPPPPSCSSASSCSSSASSCSSASAASTPSGAPTCCASAAAAAAAALLYGTGGAEDLLAPGAPCAACSSASCANNAFAFGPELSSLITPLAIQTHNFAAVAAAAYYRSQQQQQQQGLAPPAQPPAPPSATLPAGAAAPPSPPFSFQLPRRLSDSPVFDAPPSPPDSLSDRDSYLSGSLSSGSLSGSESPSLDPGRRLPIFSRLSISDD

SEQ ID NO: 170 - protein, 71 aa, Homo Sapiens
MSTRYKTELCRPFEESGTCKYGEKCQFAHGFHELRSLTRHPKYKTELCRTFHTIGFCPYGPRCHFIHNADE

SEQ ID NO: 171 - protein, 43 aa, Homo Sapiens
MYGEKCQFAHGFHELRSLTRHPKYKTELCRTFHTIGFCPYGPR

SEQ ID NO: 172 - protein, 217 aa, Homo Sapiens [sequence omitted]

SEQ ID NO: 173 - protein, 183 aa, Homo Sapiens
MKHPLQNRWALWFFKNDKSKTWQANLRLISKFDTVEDFWALYNHIQLSSNLMPGCDYSLFKDGIEPMWEDEKNKRGGRWLITLNKQQRRSDLDRFWLETLLCLIGESFDDYSDDVCGAVVNVRAKGDKIAIWTTECENREAVTHIGRVYKERLGLPPKIVIGYQSHADTATKSGSTTKNRFVV

SEQ ID NO: 174 - protein, 636 aa, Homo Sapiens
MNPSAPSYPMASLYVGDLHPDVTEAMLYEKFSPAGPILSIRVCRDMITRRSLGYAYVNFQQPADAERALDTMNFDVIKGKPVRIMWSQRDPSLRKSGVGNIFIKNLDKSIDNKALYDTFSAFGNILSCKVVCDENGSKGYGFVHFETQEAAERAIEKMNGMLLNDRKVFVGRFKSRKEREAELGARAKEFTNVYIKNFGEDMDDERLKDLFGKFGPALSVKVMTDESGKSKGFGFVSFERHEDAQKAVDEMNGKELNGKQIYVGRAQKKVERQTELKRKFEQMKQDRITRYQGVNLYVKNLDDGIDDERLRKEFSPFGTITSAKVMMEGGRSKGFGFVCFSSPEEATKAVTEMNGRIVATKPLYVALAQRKEERQAHLTNQYMQRMASVRAVPNPVINPYQPAPPSGYFMAAIPQTQNRAAYYPPSQIAQLRPSPRWTAQGARPHPFQNMPGAIRPAAPRPPFSTMRPASSQVPRVMSTQRVANTSTQTMGPRPAAAAAAATPAVRTVPQYKYAAGVRNPQQHLNAQPQVTMQQPAVHVQGQEPLTASMLASAPPQEQKQMLGERLFPLIQAMHPTLAGKITGMLLEIDNSELLHMLESPESLRSKVDEAVAVLQAHQAKEAAQKAVNSATGVPTV

SEQ ID NO: 175 - protein, 174 aa, Homo Sapiens
MSYPMASLYVGDLHPDVTEAMLYEKFSPAGPILSIRVCRDMITRRSLGYAYVNFQQPADAERALDTMNFDVIKGKPVRIMWSQRDPSLRKSGVGNIFIKNLDKSIDNKALYDTFSAFGNILSCKVVCDENGSKGYGFVHFETQEAAERAIEKMNGMLLNDRKVFVGRFKSRKER

SEQ ID NO: 176 - protein, 80 aa, Homo Sapiens
MASLYVGDLHPDVTEAMLYEKFSPAGPILSIRVCRDMITRRSLGYAYVNFQQPADAERALDTMNFDVIKGKPVRIMWSQR

SEQ ID NO: 177 - protein, 78 aa, Homo Sapiens
MGNIFIKNLDKSIDNKALYDTFSAFGNILSCKVVCDENGSKGYGFVHFETQEAAERAIEKMNGMLLNDRKVFVGRFKS

SEQ ID NO: 178 - protein, 79 aa, Homo Sapiens
MTNVYIKNFGEDMDDERLKDLFGKFGPALSVKVMTDESGKSKGFGFVSFERHEDAQKAVDEMNGKELNGKQIYVGRAQK

SEQ ID NO: 179 - protein, 78 aa, Homo Sapiens
MVNLYVKNLDDGIDDERLRKEFSPFGTITSAKVMMEGGRSKGFGFVCFSSPEEATKAVTEMNGRIVATKPLYVALAQR

SEQ ID NO: 180 - protein, 58 aa, Staphylococcus aureus [sequence omitted]

SEQ ID NO: 181 - protein, 429 aa, Homo Sapiens
MAQAPADPGREGHLEQRILQVLTEAGSPVKLAQLVKECQAPKRELNQVLYRMKKELKVSLTSPATWCLGGTDPEGEGPAELALSSPAERPQQHAATIPETPGPQFSQQREEDIYRFLKDNGPQRALVIAQALGMRTAKDVNRDLYRMKSRHLLDMDEQSKAWTIYRPEDSGRRAKSASIIYQHNPINMICQNGPNSWISIANSEAIQIGHGNIITRQTVSREDGSAGPRHLPSMAPGDSSTWGTLVDPWGPQDIHMEQSILRRVQLGHSNEMRLHGVPSEGPAHIPPGSPPVSATAAGPEASFEARIPSPGTHPEGEAAQRIHMKSCFLEDATIGNSNKMSISPGVAGPGGVAGSGEGEPGEDAGRRPADTQSRSHFPRDIGQPITPSHSKLTPKLETMTLGNRSHKAAEGSHYVDEASHEGSWWGGGI

SEQ ID NO: 182 - protein, 64 aa, Homo Sapiens
MPGREGHLEQRILQVLTEAGSPVKLAQLVKECQAPKRELNQVLYRMKKELKVSLTSPATWCLGG

SEQ ID NO: 183 - protein, 65 aa, Homo Sapiens
MPQFSQQREEDIYRFLKDNGPQRALVIAQALGMRTAKDVNRDLYRMKSRHLLDMDEQSKAWTIYR

SEQ ID NO: 184 - protein, 991 aa, Capsella rubella
MHRGNEDLSFGDDYEKEIGLLLGEQQRRQEEADEIEKELNLYRSGSAPPTVDGSVNAAGGLFNGGGRGPFMEFGGGNKGNGFGGDDDELRKDPAYLSYYYANMKLNPRLPPPLMSREDLRVAQRLKGSSNVLGGVGDRRNVNESRSLFSMPPGFDQMNEFEAEKTNASSSEWDANGLIGLPGLGLGGKQKSFADIFQPDMGHPVSQQPSRPASRNAFDENVDSTNNQSPSASQGIGAPPPYSYAAVLGSSLSRNGTPDPQAVARVPSPCLTPIGSGRVSSNDKRNTSNQSPFNGVTSGLNESSDLVNALSGMNLSGSGGLDDRGQAEQDVEKVRNYMFGFQGGHNEVSQHVFPNKSDQAQKATGSLRNLHMRGSQGSAYNGGGLANPYQHLDSPNYCLNNYALNPAVASVMANQLGNSNFSPMYDNYSAASALGFSGMDSRLHGGGFESRNLGRSNRMMGGGGLQSHMADPMYHQYGRYSENVDALDLLNDPAMDRSFMGNSYMNMLELQRAYLGAQKSQYGVPYKSGSPNSHSYYGSPTFGSNMSYPGSPLAHHAMQNSLMSPCSPMRRGEVNMRYPSATRNYSGGVMGSWHMDASLDEGFGSSLLEEFKSNKTRGFELSEIAGHVVEFSADQYGSRFIQQKLETATTDEKNMVYEEIMPHALALMTDVFGNYVIQKFFEHGLPPQRRELGDKLFENVLPLSLQMYGCRVIQKAIEVVDLDQKIKMVKELDGHVMRCVRDQNGNHVVQKCIECVPEENIEFIISTFFGHVVSLSTHPYGCRVIQRVLEHCHDPDTQSKVMEEILSTVSMLAQDQYGNYVVQHVLEHGKPDERTVIIKELAGKIVQMSQQKFASNVVEKCLTFGGPEERELLVNEMLGTTDENEPLQAMMKDQFANYVVQKVLETCDDQQRELILTRIKVHLNALKKYTYGKHVVARIEKLVAAGGMHMFLLFPLGLKEENGFAVPNPASDVVRPQVLYSLTRVDGSAIAF

SEQ ID NO: 185 - protein, 320 aa, Artificial Sequence
  Elastin-like polypeptide
GRGDQPYQGRGDQPYQGRGDQPYQGRGDQPYQGRGDQPYQGRGDQPYQGRGDQPYQGRGDQPYQGRGDQPYQGRGDQPYQGRGDQPYQGRGDQPYQGRGDQPYQGRGDQPYQGRGDQPYQGRGDQPYQGRGDQPYQGRGDQPYQGRGDQPYQGRGDQPYQGRGDQPYQGRGDQPYQGRGDQPYQGRGDQPYQGRGDQPYQGRGDQPYQGRGDQPYQGRGDQPYQGRGDQPYQGRGDQPYQGRGDQPYQGRGDQPYQGRGDQPYQGRGDQPYQGRGDQPYQGRGDQPYQGRGDQPYQGRGDQPYQGRGDQPYQGRGDQPYQ

SEQ ID NO: 186 - protein, 400 aa, Artificial Sequence
  Elastin-like polypeptide
GVGVPGVGVPGVGVPGVGVPGVGVPGVGVPGVGVPGVGVPGVGVPGVGVPGVGVPGVGVPGVGVPGVGVPGVGVPGVGVPGVGVPGVGVPGVGVPGVGVPGVGVPGVGVPGVGVPGVGVPGVGVPGVGVPGVGVPGVGVPGVGVPGVGVPGVGVPGVGVPGVGVPGVGVPGVGVPGVGVPGVGVPGVGVPGVGVPGVGVPGVGVPGVGVPGVGVPGVGVPGVGVPGVGVPGVGVPGVGVPGVGVPGVGVPGVGVPGVGVPGVGVPGVGVPGVGVPGVGVPGVGVPGVGVPGVGVPGVGVPGVGVPGVGVPGVGVPGVGVPGVGVPGVGVPGVGVPGVGVPGVGVPGVGVPGVGVPGVGVPGVGVPGVGVPGVGVPGVGVPGVGVPGVGVPGVGVPGVGVP

SEQ ID NO: 187 - protein, 720 aa, Artificial Sequence
  Elastin-like polypeptide
GRGDQPYQGRGDQPYQGRGDQPYQGRGDQPYQGRGDQPYQGRGDQPYQGRGDQPYQGRGDQPYQGRGDQPYQGRGDQPYQGRGDQPYQGRGDQPYQGRGDQPYQGRGDQPYQGRGDQPYQGRGDQPYQGRGDQPYQGRGDQPYQGRGDQPYQGRGDQPYQGRGDQPYQGRGDQPYQGRGDQPYQGRGDQPYQGRGDQPYQGRGDQPYQGRGDQPYQGRGDQPYQGRGDQPYQGRGDQPYQGRGDQPYQGRGDQPYQGRGDQPYQGRGDQPYQGRGDQPYQGRGDQPYQGRGDQPYQGRGDQPYQGRGDQPYQGRGDQPYQGVGVPGVGVPGVGVPGVGVPGVGVPGVGVPGVGVPGVGVPGVGVPGVGVPGVGVPGVGVPGVGVPGVGVPGVGVPGVGVPGVGVPGVGVPGVGVPGVGVPGVGVPGVGVPGVGVPGVGVPGVGVPGVGVPGVGVPGVGVPGVGVPGVGVPGVGVPGVGVPGVGVPGVGVPGVGVPGVGVPGVGVPGVGVPGVGVPGVGVPGVGVPGVGVPGVGVPGVGVPGVGVPGVGVPGVGVPGVGVPGVGVPGVGVPGVGVPGVGVPGVGVPGVGVPGVGVPGVGVPGVGVPGVGVPGVGVPGVGVPGVGVPGVGVPGVGVPGVGVPGVGVPGVGVPGVGVPGVGVPGVGVPGVGVPGVGVPGVGVPGVGVPGVGVPGVGVPGVGVPGVGVPGVGVPGVGVPGVGVP
